United States Patent Application Publication US 2026/0265781 A1 - sequence listing, part 6

SEQ ID NO: 22 - DNA, 26290500 bp, synthetic construct (residues 10,954,376-13,145,250 of 26,290,500)
  source 1..26290500: mol_type = other DNA; note = Hot spot 1 - Chr 3 contig ref|NW_020822499.1 from Cricetulus griseus
aaggggatggggcaagatcccctgaccaaagtgggagcccagggtcaggagaggaaggagagccttcatcctgttgctatttgaagcagaaacagatacccacagctaagcactgaaccacactactggaattcagttatggaaaggatggagggatgagcaaaggagccaagacagggatagagagatctgctgaaacagtggacctgacctactgatagcatggagacccttgtcataaagctggggaaacagcattgtatcaaatgaagccctctgaatgtgggtgccagctaggaggccaagacagtctatgggacctctaacggtgaagccagtgtttatccctagagcacaatggactttgggagcccattccctatggagggatactattgtagcccagatacagcaaggagggcctagggcctccccaaaacgatatgacagactttgaaggtccctagtaggggacctcactatccctgaggaggagttggggggtgtttctggggttggtggggaacatgggaggatgggagagcgagggaatgggggatggatatgcaaatatgtgtagtaattaaagaatttttaaaaaataattaaaaacaatatgctcaaaaatggatttagatatcccccatactctcaaagtttctgcaatatgtctataaataaaaagtttgctcttctagctacttgggtcaaaaccttggcatcctcattgccactcttcttcctctcactaatatacccaaatcattgtcaaattcagttaccttgcctttcaagagacagccagaatccaattatttattccttctttcaatactactgtctttgcttaagacattgtctgtcagcttgctgctagagactctcctagtttggtttcttttgtcttaccatgtattctcattgtaacagtcaaagccatatgctgaatataaattatatcatgtgtcatctcttatcttccaataaggggctgggaagagaaggttctgtaaggctgttcttacagaggacttggacgtggttcccagaacccatatcaggcagctcataaccatctggaactctagttcctggagatctagcaccctcttctggtccccataggcacatagaatgcaagcataaacactcgggaacacagacatacacacttaaaataaaaatagataaatctttaaaatttttcccattcctatattatgttacctagatgaagagctaacatgctgggtacaagaaagggttatgggggtaaatagaattaaaatgatatgaatatatattaaaatacattatatatgtgtgaaatgtcataataaaacatgttagtatgtttaagtaatgcaggctactaaaaccttttaaaattcgagaaaaacgtataattataattgtgatcttcaactctcctctttatgctaaatatgtagacctaagtaaactctcttcaggcaggtagacccttctgcttcattctgcctacaacgttttctttccaacatcttcatgtagagctactcaaatacaacctaatcaatggacccttgctttctctatacaaaatgtagagataaaacacatgcccttatgcttaaaagattaacatccaatatgccttacttatatacccatctacttattcagttactatagttcttgagggttcgttttgcctgggtttcttctcactttattttaagataccacaacaatttaatcagtgcatggtacttaaataaatgaatgcataaacaacaaccaagtcacaaagtcagatcacaaatggtacccagatattatcttgagcttaaaaggcattcttagaattaccccccaaaatttggttggctctagcatgaaactgagatatcaggtaggaaatggattgttagataaataaaacccaccattaaaagaggccttggaatgcttccaggttctggctattacaaacaatgctgctatgaacatggttgaacatatgttcttgttgtatgaacatgcactatttgggtatatacccaagagaggaatggctggatcttgaggtagactgattcccatttttctgagcaacagccatactgatttccagagtggtcttacaagttcgcactcccaccagcaatggaggagtgttcctttttctccacatcctctccagcatagattgtcattggtatttttgattttagccattctgacaggtgtgaggtggtatctcagagttgttttgagttgcatttctctgatggccaaggattttgagcactttcttaagtgtctttcagccatttcagattcctctgttgagaattctctatttagttctgcacccccactttttaattccattgtttggtgttttggcagctagcttcttgagctccttatgtattttggaaatcagtcctctgtcagatgtgaaatcggtgaagatcttttcccattctgtggctgtcgttttgtcttactgactatttcctttgccttgcagaagcttctcagtttcaggaggtcccatttattaattgcagacctcaatgtctgtgctactggcgtaatattcaggaagcggtctcctgtgccaatttgttcaagggtaattcccactttctcttctagaagattcagtgtggctggatttatgttgagatctttgatccatttgcacttaagttttgtgcatggtaacaggtatggatctatctgcaattttctgcatgtccgaatccaattgtgccagcaccatttgttgaagatgctatcttttttccattgtatagatttagcacctttgtcaaaaataaggtgtttgtaggtgtgtcggttattatcagggttttcaattcgatttcattggtctatctgtctatttttgtgccaaaaccaagctgttttcagaactgtggctctatagtagagcttgaagtcggggatggtgatgcctccagaagatcctttattgtaaagagttgttttggctatcctgggttttttatttttccatataaagttgagtattgttctttcaatgtctgtgaaaaactgtgttgggattttgatggggattgcattgaatctgtagattgcttttggcaggattgccatttttactatgttaattctacctatccaagagcatgggagatctttccattttctggtatcttctttaatttctttctttaaagtctcaaagttcttattgtacaggtctttcacttttttggttagtgttaccccaagatattttatgttgcttgtggatattgtgaaaggtgatgtttccctgatttctttctcattggatttatcatctgtatatggtagggctactgatttctttgatttaattttgtatccttctaccttgctgaaggtgttctcagccataggagttccctggtagagtttttttgggtcactaatgtagactatcatgtcatctgcaaatagtgaaagtttgacttcttcctttccaatttgtatccctttgatccccttttcttgtcttattgctctagctagaacttcaagtacaatattgaagagatatggagagagtggacagccttgtcttgttcctgattttagaggaaatgctttgagtttctctccatttagtttgatgttggctattggtttggtgtatattgcatttatcatgtttagatatgttcctgttattcctgttctctccaagatctttatcatgaagggatgttggattttgtcaaaggctttttcagcatctagtgagatgatcatgtggtttttctttttcagtttgtttatatggtggattacattgatggattttcgtatgttgaaccatccttgcatccctgggatgaagcctacttgatcatggtggatgatttttctgatatgatatgttcttggattcggttcgccaatattttattaagtattttagcatcgatgttcatgagggatatcggtctgtagttctctttcttagtcatatctttgtgtggcttgggtatcaaagtgattgtagcctcataggaagagtttggcaatatcccatctgcttctattgtgcggaacagtttgaggagtgtggtagagtgttgtacatttatacaatggcagaaaaaatcaatggaatcttgaaattcacaggcaaatggatgaaactagaagaaaccatcctgagtgaggtaacacaatcacaaaatgacaaacatggtatgtactcactcatatatgaattttagacatagagcaatggattaccagtctataatcctcttcaccaaagaaactaggaaacatgaaggactctaagggataaatggtctccaggaatgggaagtggcatgaactcctgagctaattgggagcatgagggtaggggagagggagctgccacaatagagcaagagaagaggagtagaggagaggaaatggaggggcagaaatattgagttgggggaagaatagaggagagagagcaggatgagagataccatatcagagggagccactataggtccgtgaagagatctggaactacggagatctccagagacctacaaggatgacatgatctgacaatccaggcaatggtggagaggatagcctaaaagcccttcccctaaaatgagattgataacttctctttatgccatcctagagacctcatccagtggctgatggaagcagaaacagacatccacagatatactctgagttgaaatttggaatttagttgaagagagggaggaatgaagagtgaaggggtctgtaccaggttggagaaacccacaggaacagttggcctgaacaagggagaacacatcgaccccaatgctgtcggggaggccagtacaagactgatccagaccactgaacatggatatcaataaggaggcctctgcactccagggagcctctggtagttgattaatatttttccctgttgcaagaagggactttgagagcccattccacctgaagggactggacagatggggaagggcccaggcccagtacaggaagatttggaggacactgcagagctcctgttgagggccctaccctgcctggggagtggtgggtggatgggatgggggtaggttgggggtggggagagggatgggggtgaggggagggagagggagaagggacttacatgtgaaacaagcttgttccctaacttgaactaataaaaaaaaagaggccttggagagccaagcctgttagcagaggcctataatctcagttgtttaggatgctgaggtagaaggacacaatttcagtgtctgcctgggctacagagtgatttcaaggccagcctagacaacttggtaagaccctatcatcaactaaaaagtaaaataggacgggggctataatataactcagtggtatagtgcatccctctcatttgtgtagccctggattcaatctctagtaccaaaggataaaactaaatgatgaagatggcttggaccacagggtccaaaatggtaatctgagctacaaaagaagagaaacaaatatctccaggatgttccgagaagaatgcaagagacttggcaaaaacagcaatagtatttaaagcattgtctcctccacctcttagactttgtagaaaagaattccctagacagggctaaggatatcgctgccctttgaaatatgtgtttacagactggctcctgattcctcaaaacaaagacataaaagacactaagtcctaaagagattttataaagctgtgtaagagagggggagtggggagataagagaatataaaccttctgagaaatcagaagggaacctgagatctgggagagctcaccgcctcatgctctctttcctggccactttcttccttgtatctaataaaccttttcatgtcttttcaagtggtgtagagggagtcgtaaagaagcagccttgacagatgcacatggcagctcaatacagccaaacaaataatcacacttcagagcctgcagctcattggcatctccctagaaggttgcacttggggtgtccctccagggcaagcagagtggatgctctgaactcactgaggacatataaaatagtagatccccaaagtttctccaacacagaagcagccctgtgcagcagaatctgctaaatgctcaagaccagagcagtttcaagaaaaaaaaaaaaaaagaaagaaaaccaagagtcaggaaagtctccgtgcctttctcagtaattgctttcaaggtaactccatttgatcctcctaagaaccagcctgccccattttctatctagttgggagttcttagagatgccaacagtaatatagggcattttaaatgtgtttctttcttgcttctttattggcatctaatcaaatcataagaaatagggaatacaaaaagaaagaacagtagatctgagagacctggtgaggaccaagagcaacagaagacccagcaagccatgctctttttcaagactccagttgctggtgctggagtaatagctcggttgctaaagtgcttgccatgcaagagtgaggcacctgagttcaatccccagcacacacagaaaaattctgggtttggtggtgcaaacttgtaatctcagcactgggaagatagaagcagaaagatgtctgagacttgctagtcagccagctcagcctgcgtggtgagtgtcaggacagtgagaggccctctcttgaaaaagaaggtagacagtgcctgaggaatgatactcaaggttgacctctggcctccaccctcatctgtgcttgtgcacacatgaacacgttcacacacacacacacacacacacacacacacacacacacacacaaatacaatgcttgaagaatgatggagataaagaagtagagttggttgtgtgatttagggcatgtactttgcatttattttattttcatctacagtagccagatttgtttctctgtctctgtctctctctgtctctctgtctctctgtctctctgtctctctgtctctctgtctctctgtctctctgtctctctgtctctctctctctctgtgtgtgtgtgtgtgtgtgtgtgtgtgtgtgtgtgtgtgtgtgtgtgtgtgtgttattctcataggtgaatgtggatggacatgtggatgtataaaaatgcatgatagtggaaggcagagatcaacctcaatatcattcctggaagaagattgaagaaaccgcctttggtgtacttccaaagggtcctctagatcctgtctagttgacaatcgagattagctgtcacaactactaaatagtcttttccttaatttctggagtcatgtctagttcaagttcatgcactatgtttgttgacacaagctagaatcattgtggaagagggaacaacagttgagaaaatgtctccatcagattggcctgttgacaacctttgatgtttttacttgattggtgacaaatgttagaggactctgagttatgtaagaaaacaaacagggaaagccaggagagagcaggctaacaagcagcattcctccaaggtttctgcttcaggttatgcctagagtccctgccctaatttctctcagtgatggactatgacctggaagtgcaaactgaaataaactctcctcccatgttgcttttggttatcaaagcaatagaaaccctaactaagtcacttctccatcacttcaccagtgtatggagctatcatttccattgttctcattcactgatttcataaggtttcattaagggctcattttaggcaaggtatcacaatgggaactgtagaggagatacaaaacatacatgtcttagtcactgtttctatgtttcatcactaaaggaagtcagggaaggaactcagcagggcagggacctagaggcaggaactgaagcagagcccctggaggagtgatgcttactggctttctgctcatagcttgtgtaccctgtcttctttaaaaacccaggaccacctgcccagaggaggcactgcccctgtggtttgggcccacccacatcagtcattcaagaaaatgtcctgaagaattgcctacatgcaatctgttggggatattttatcaactcaagttcttcttcccaaataactctagtttctgtaaaattggaaaaaaactaactagcatagaacagacccaggcagtgtcttacaaaaatgatcacattaattttcagggaaaaactagttaagtattttatagcaaaagcattaagaagcgattccaacaacctcattgtagggcatcactttatctataaaacaacaacaaaagcaatgctaccaaatgtgaactcaacaaagaccaggggacaaacacaggtagtcttgactatcagtagcagaacaatggcccaggaacctgagcataaaggagtcttaaatgcatccatagcacatgtccataatagcatcaagcacttaagagtccctagctaagggcataaacacgggtccctctaatacaacacaaactctggaacactgggcaggtccagtatcccatttgtcacacacaaggccttcagagacttgcctgtcaatgacgatctggacattatgactctaaagcctcttccagcgctagaattcagtgatttttccatctgttccacatcagaaaagcattttaggtctgtccaaagtgcaatcagcctggagtcaatttttttaatccatgtcttcaaaattctttgggctctctgaagatttagaattgccaaggaatgtatgaccatttaggtggtccagcctcgagtctgggcacctcctcctttcaggtcctttggattcttccacttggtccccagtatccctcttaaatctccccccaacaacttggccacatctctcccaactccttattaacatatggtctccttaactcacagaattgtctgcctcaggttttttttttttttttgaaaagctactagtaaaagttctgaaatagaaaccagatgcatgcatgcaccttgggatgtatgtattatgaagatgaaaccgacacatctcttcccagttggctttgtatcttttttcccccacctggtcatgtggtgcacacctgcagtacgttgacaaggctttagattacaacatgaatggttatatcaggttccaggatggacttgggttttaatcccaagtgggtagtgcatgcatcaagggtttttattcccacctcatctttacagctctcctggcttcttcctgcacttgagctaatatttcatgtgaacaaacaagcccctattcccttcttctactttgcaaaaaaattttgttgattttgcaaagctgcccttcccccactcagttgtcagtagaaatattgtggtgtgaggcaaacatgtgcgaaggatgggatcactctcaccgtaaaactgctcacatctttcaacagattgtctcaggctggaaaaatgccttgaattgaatagctttggaaaatgtcatcttctctcctgtcaatggactgtatgtatgtccatacatgttcatataatgagaagatgctgtgtaactttcgaaccctaataaactttggaccctaatgaactagagttcatatacaagcacgtatgtgcgtcttaggtatagaaaagaaagtgatgtagttctaagtcgccctgtgaaactcaaatgccacagatatagccaaggcaacattgtatgaccttacaaatacagtgacaaggttttctaactaaaaatacaagatttaagttggtgggtgttttaagatttgagcagagtacttggaagtataaacactatatgaattctgcaatgtaagaacaggcatgttaaaagacatacactaaaaattctggctgtaaaggctaaaacaagaaatgcttggagcatttactgtgtgttaagcattatctccctgtcttgcttatttccatttttataatctacatgcaacattgtgatcttacatgaacatacaaatttcaaacccctatcttctattttgttgtcacgaattctttactctcctgttcatttacaaaaaaaaaaaaaaatctgtcaccactatccccacctccaaattcaagttgtcttaactatgacttactttgatctatatgatggtttggaaatgattatgatacttaatcttggttgttgatttgactggattgaaaggtgcctagacaaattttatacctctgggtgtatctaactggaagttttcagaaaagatggccacgtgaatccatagaatgaggaagaaccacactgaatgtaagtggcatcattccaaaggtgaaacaaaaaagtagagaaaaaactcggttgcctgcaaactcaggcttgaccatctctgctgtcttagtcagtgtctatagctgtgaagagacaccatgcccatggcaagtctcaaaaaggaaaacatttcagtggggctggtttacagtttagaagtttagtctattgtcatcatggtgggaagcatagtagcacataggcagacaagatgctggagagaaggtaagagttttatatacttatccaggaaagatatcaggaaagagcaagctactaggtctggcttgagcttctgaaacctgaaaattcacccctagtgacacaacctccaacaaggctatacctactccaacaaagcaactcatactaatcattttatataataccaccccctgtgaacctatgggggccattttcattcaaagcaccaaaccttcttagatgtgaccctgttgctactgtcacagatggccatcaaactccagattcttcagctttttgcacaagtccctaacagctccccaatacccacaggccttcatccctgaactagagatacatcattggttcctcttgtgctgaggcttccagtttctttgattgagcagccacagtcttcaccaagtcattatggctaacggcctcagttgaacccttagctagcagtataagttccaaccatgggagtgacctaatgggatgtaccagcactgccaggtcaccagctgatgtagctccagctggtgtgacaatcagcagaaagtccctaggtgaacctagtgaacccatccaattataaaagagaatgcatattattatgtaaagtgaaataagatgctttaaaagagaaatactacacgttttcctatgcagaacacatatttaaagttgtgtatatgtacatgtctagatatgtatatatgttataggagtcatgaaacttgaaaagggatcataagagtgtagaaaaggattttacattttggaacgtaaaaggaagtggatgggagaataaatgctaacagaatacatatgaaaagaaagaaggggaattagaggaatgaagggaaccaggtacatcagggtcaaggcatagtggaaggcagtaatagaaatgagaacacatgtatgatgagtacatgaggtaacagaatggccaagaggtggggaggatggagtcagagagcaatgaaagaggtatcttgatagagagagtcattatggggttagggagaaacctggtgctagggaaattcccaagaatccacaaggatgaccacagataagactcttggcaatagtggagaggatgcctgaactggcctcccccgtaatcagattggtgaataccccaactatcatcacagagccttcatccagtaactgatagaaccagaggcagggatccacaaccaagcaccaaactgagctctgagaatccaatcaaagagatggaggagggaatatatgagcaagggaggtcaagatcatgatggagaaatctacagagacagctgaaccaagtttgtggaaactcatacactctagactgacagctgtgaaaactccatgggactgggacagaactaggcagtaggaccacaatgtatccctggtgcatgagctagcttgttggagcccattccctatggtggatgccacactcagccttaatgcagcagaaagaggcttgggtctgcctcaacttaatatgccagagtttgttgactcctcatgggaacccttatctgttgggaggagtggatgggggtgggatagggggtgcaggaggaggactgtggttggaatgtaaaatgaaattttaaaattttttttaaagaaatgtcataatgaaacccatatttttgtatgccaattcaagaaattaaaagagagaataatgagtgaactttaagacactttgcatgggagttcagtccacagcaatagatcatgtcattgcttccttctccaaaattcaatttcctttttatgcactgcaatttgtttatgtctatacctgaatatgcttacatatatataactgacacataaaacttactctccatgcctgcctttcagtgacagtctgggaaatgctttgaaatctactctttctgtctcctcaccatcaggtatctctgtgagatgagaacgggccaaaatttattttcccactaatattaaattgcccactgcatttaagaggtggatatgcctgtcaaaatggcaaatgcacccataagttaacaaagtctcaacatgcttgcctaggtgctttcacagatctaggaggggtgtgtatctgtgtccaaagtccttgtaaattttacacaaacacaatatatgcactgcaacccacaaagggtgctgtctgttgccctccagctacttttctgggagtcccagtgaccctttcccagtcaagtgaattcttaccagccacagacactttcaggattctactctaatgaaagatagacacaagaccatcatgttatgatacagatgtctctcatggtggcaaatactgaatgaagtggaaaaggaagcatagaatgaatataaaataaaagattttggaacactctgtcaatcaataaacgtgcaaacaaaggattagtggaccatattctaataaagacagtagaaatgaaagttctcctctctcaaggacaaacttctccatggactgatgttaccatcaacacagcatgtatcttttgttcatctaacacaattcctgggtttgtaggaagccatttttgtcaggactacaagtaatagcccatctttgtatgtagatatgtctatgtatactgatgtcatttaccaacaataatggtggaattgtgatggaccaatatataagtgaaaactttctcttcttcctgactcttgcaaataatgattcaatacatatgtgtgtacatctccatggtatgctgactcaaagtccttaaggtatatcccaaggaatggtgtagctggattgtatgatacttagtttttattttgaggaactacactgaattctgtggtagctgtaccagcttacattccacaagcagaatatatgatgaatggctgtcaaagactccccctccctactctatagactgtctcttcttccagaagactgttcctttgttgtacagaaactttaaaaggtaatgcaatcaatctcatttgttaattcctgggattatttcttgtgctaatggaatcctttccagaaattgctcaactatgtctatctcttgaattgttttacctgtgtttaaaacgagatgaggacacaacacaaaagaatattatgcaatcatttccatggtgagcgttggtacaaaactcagtaagatagaggcaaataaatttcagggacagattaagaagatcatatactaagatgagttgatttcttcacatcgcaggatgtgaagttggttcaacatacacaaataaataaacgtaacacaacacgtgaataaacttaagaatagaaataccataatcaacaaatacaggaaaagactttgagggtgcaacacattttcatgattcagtatcatgatcaaagtcctagctggtgcaataagacaagaaaagggaatgaaaggactacaagtaaaaaaggaataagtcaatttttcttctcacatagcacaattctatacttaaaaaatttcagagacaccagcagaaaactcttagacccctcagcaaagtaacaggatacaaaattagcatataaaaatcattatctttcttttatacatatgaagaacacgctgagaaagaaatcaggaaaacagtcccatttcaaatggtctcccctcttccccaccccaccccccacaaaaaatacctaggaataaatctaatgaagacagtaatgaggtgaatgatgaaaattctagacactaaagaagacattagtagatgggaaaacctccatgctcgtaaactgccagaattaatagtgtaaaagtagagatattattgaatgggatccatagatcaaagcaattatcattaaaattccaatgctattcatcatagaaagagaaaaaactatgttaaaatagacatgacaacacaaaatatcctaaacaaagagatcctaagctaaaagagccacactggaggcattgtgcttgtctcaaaacatactacagagccagattgtatgatactattttaaaacattggaacagaaaagatggtccagaaataagtctatatgattactgccacacaatttttgacaaaggtttttgacaatgtttccccaaacattgggggaaaaaagagaccctcttcaacaactctgctgacaaaaaaaaaaaatgcatagcatatccacatgcagaaagcaattagatccatttccctcatccagtacaaaaaaatcaatttaaagtgaaacaaaactttaacacacaagttgggttttgtttgtttgtttgtttttcttttttctgggttttgaatggttttaggtttatatttttatttcttagtaatttcacacatgcctgtgtttgacagagtctgccctccatcccctctgctcctctatctccccaccaccacatcttccaacttgacacttcatattctttttcttttcattttgcctactgagtcttctcactattcccaggatgtgcatgggtgtaagactgtaatatgagaatttttttcagggaccacatcatgtggttttaaaaatagtcatcagattttaaaacaagaaagcttgacttgaaagccttgatttctgcttttactctatatagcataataccatattaggtatatatgcaatatatatgtagcctaatatatatatagtaataccatattaggtatatatgcaatatatatgtagcctaaatcacaactctctgttgctgagttacatatgcaaggttaataattacacagtcaaagcacaggaaaaagagacttaaagttgctatctaagtctaaggcagtacagatctatgaactttaatttcatctattcccacatttaacctatagaaaacattgtaattatcatcattacttcagaaatttgcatgaattagttcatcagtagctctctcataaagaaaagaagttgcagaagatatacttcaggcaccaataactccgtgaagtctaaaagtgtggccacataaagcacacacttgaagaaatcattacagtgtaaaacatgtatttaacgggtcagacaataaatggcaaatgataatttcataggagctggagttacacacatcacttttgtaataaggaaagagaggtaacaaaatgcatccaaagagggatcctgtttctaactcagccttaaacaacatctgtctttaccgttgttcaaattctgaagcattcaattatcttagcagattggaccctcttcaacctgccaacaaggcaggtgttccaatgctcggctagaggaggagagccctgggtagggctagggacacgggaggttcaaagtgacattgtccaattctatattgggaactatcctaagccaactgttcatcagatgccaaaacattacccttacttcaaagaaatgaaaccaagagaaaaaacaaatatgtttcttgaacttttctcattttttgccaaactgaacaagtcataattttacagttgtcacagtgacagttaatattattgaaatttttcaatgtatcaagtattaatctaaggatacagcaggtgctacttcacttattttaatctttaaaggaactccatcataaaaataagaaaggaaggagtacttgggacaaagaacataaggaaacttgttccccaaagctttttaatgcctgtgatacaacacccaaaatggcacaaacttaagtctgactgacaagaatatcttgtgtattaatcaaacagtaagcatgatttaaaatacactacaaattataaaagaactcaagtcactgattgtacccatcctaaggaaggtatatattagtatgtatgtattagtatgttgttttgtatgttttctgtagagggaggggctgtgctatcattgtgaagccttatgacatgaagatgaaaagtcagagaagaaaaacacgcagacttgatccaaaacagaccttcacatagcaatttgtgttgaaaggtcagtgatatgatgatcagaccatagtaagcaacctggactctgaacttcacagcttgtccagctgaagtctgtgtttgacttagaggagaaagagaaggaagccatacacacattcctcttcgtctaacatacctagccattattttgctagtgtctcaataacacagttttcacagatgttcttcatttgtataaaatgaataatcttacatatttccttcaaaatccaataaagctatttgccttttccaatgagaatttaaaaacaaacattgaccaataactatatattcaggtttcccttaagtagtctccatgaaaagaagtacacacactacagccctcaacagtccaaaggaagaggataaagaagccagtcaagaaattgttgtggaatagtcctttacactgcgtgaaagtatatcactgtgattggtttaatatagccaggcagaactttctggtaagagagaacactgggaagaagggcagagacaccaagaaatgcagaacgaacaaaatgggcagtatgtagatgaggtaaacaacccttgaagcagtacatagattaatagaaatgggttagtttaagttataaaagctagctaaaaacaagcctaagccttggacagtctgtgaggaccctggcagtgggaccaggatttatccctagtgcttgaactagctttttatagcccattctttttgaagggatacctggctcagcctggaaataggggagagagccttggtccttcctcaaagagatgtgccagacttcattgactccccatgggaagccttaccctctctgaggagcagatagagtgggatgggaggaaggtggggagagtatgaggaagggagggagtaggaactgggtttggtatgtaaaaaagaaaagattgtttttgttgttgttgttttggggcggttggttttttgggttttatttgtttgtttgtttggttggttttggtttttcaagacagggtttctctgtgtagctttggagcctatcctggcactcactctggagaccaggctggcctcgaactcacagagatccacctgcctctgcctcctgagtgctgggattaaaggtgtgcaccaccaacgcccagcaagaaaagattgtcttaaaataaaaaaatatatatatcatgtcaaaaaaaaaaaaacaagcctaagccatcagccgagatttcacagttagtaataagtctctgtgttgctttttgtgacttagtagcccaaagaaaaatccaagaaattgctttggttttcccacaaccagcatatgtgcttacaaacttgatctgaaagatcgtgaggcacatgaggccttatcccaacaccaccttgttggggtctgtaactgttttaagtttaggaatgagaaaacacagtgctagagagatcatagaacctttccagatcttggtgctaatccatccagctttccaaaacccttgatctttacctggatggagcacatcactcagatgaaaggatggcaagggaggagacacatggcaaatgaagaccaagcccattctgagggtatgctggaaggatggaggacactgtgtcagccatgctaaggagtctgaaccacacacaataagaaatacagggttatgaaaggacttaaacatatgatttgatggggcttttaaaagttgtaacttccttaaacattcttttcttttcaaaagtctctcacgtattgtgggctagccttgaacttgctctgcagccaagaatgactgatgcttctgcttccacctcccaagtgctggggttatgggggtgtaccacaatgtctggtttatgttgtactgaggatcaaacccagggctttgtaaatacaaagcaagcactctaataagtgcactctactatcctcaaccccaaaaaaacatcttaagacatgatgtagacccatacactgctatctattgggagtggggtttgtttcgttttctaaaacataaattgctaacatcctcactctaaatcaagatgcaagtttttagagtttgtggggttttgttcctaatctttgagatcttttttacaaagtgaccataagctctatttctgtcctgacagggaccatggaaggtagtcatagttgtttatgttgaatgcatggcctagttcctcattgtgtaaatgacttcaggctgacaaacttgatccaaaggaagctgctttatagtggcaggtgcccttgtagctctcccctgatcagttcattcttaccaagactgtcactcttaggagacttctgactaagaaaaaaattgagtctagttgggtaggtcaggtcagatatggatgaggcaactaaacaaaacacacaaaatatcagaagcaacattctaccaacagatcccagagagaacaggtgacgggccaatgagagggaaccagggcttgagtcagaattgaaaacacattgctcagctggagagagcaggacctgtaagctaaagccttccctgaagtccaggttgttacatgagcaggcttctgtagaggagacttttctccatctggcctggtctcacttgactagtttctctccacccaccagttcctgcagccacttataaccactcagagacttaatatgtatttataattgtttggccaatggcttaggcttattaatggctagctctctctcataaattaacccatttctactaatccatatatcatcacatagctgtggcttactgatgatgccctggaatcttgaccccaggtgtctacatgtcatctctctgacactgccctctctctctctctctctctctctctctctctctctctctctctttctctctgttctgatttctcacttggccttactcggtttagccatagtccaaaacagctttattcatcgatcagtaaaatcaatacatatttgcagcatacagaaggaaaactcacatcaggtttccaaagggaattttaactggagcactttagagcaacaggcaaaagttgctctgcatcttactgtgactacaggatagttggtgaatccaggaagttggatccagctatcccctggagcagtagtagcctagaggtggtatatgaggcagatatctggatcagccatcttgaactgagagaagctagaaaacctggaagatgtttggagggtcactcagtcagctggatcatatccagaagagaagtcgaggcaatacaatacaatacaggaactaactacatggagctcctcagactccattattgacatttgggggctatgtgaggccctatgggttacctcacagtatcccaagctctcacccagaagatgctgcagcatttccagttcctgcagctatgacaaccaaaatggtgtctagtcatgccaggttgacaggcactagaaaaagatcttaaatattgtaaaacacttgagcagaacttaaacacagaaatacttacaaatgagaaggtgcataagataaaatgcaaaatggtaaaggtaagcattgcattttatgcaggcagtgtgaatgtgtcctgtgagcagagctgaagtcaacctcaagcagcatttgagggtcagggcaacataagcacttcagatgagtgactttgacatgtcacagagcactttgtgtctatttctgtgtgggaggctgcatgaagttctaatctgcctaaatctgattgggtggctctctgattgctctattcatctgttcgtttaaagtccttttcataccagcgttttctgactacactcataacccagcaatcatcccagctctatcaagcaggataatggggctttgctttaagctgagatactccacaaagcataagcaggagatttagatgcagctgaagcttctgaaagttaagagcatagtgagggttcgcatttgggcaacaaacaccaccagggtgccggtttagcttttcctccagttgcaaacataataccttcattctttcttagagcctttccatgaagtgagaccttgcatggccaacttcccctcgattcatccctggcttctatatggagtggcatttggtagctgacagatgaaacacttaatgcatagcatatgtggctgccacgcccctggaaccctccctgttagggctccaagtagcactattctgtagaccactgaggatcaacttctgtccagaagaaaagccatcaacaacaaagggagttagttcaccctggcattcacggagtgtgccagccatttctccagggcctggcagaggatgccaacagatcgttcactcctgttggcatcctagcccctctcataccctacagtagctcacaacacctgtgcagccttctccccctgcctggacctggtgatggcagaagcatatgaagaagtcacttaacttcttgaccctccctgatcatttggtggctgtcacagggaaaccaaatgtgaagcaggaggttgtcagagatgagctgggttctgagaggcgttctgagggcagcggaaaccctaaagagcctcgggggatccatccatcttccagaagagctttgtgaactgcaatttagagtcaggtgcgccatcttgagaaaccatcccacattccaagcaaaattagtttaatgttcccacataaaacagtcccgagccaggtggaggatcattatatgcacacgcactgtggaactaaaaaggtttgcatgctgctggaaggaatttacggggaaatttattacagatccacttcttatgtaaattgtgttgccatatgatgagctgagtggaagtagcaaggccaagaaaggttactggacccaaacatcattagagcttccagcatcccctttgagaaacaagatattcttcatccagatatgctgcctcatcctatgaaagggaggaaagcagaagaaaggacaatccaaacattctacagataaccccttcactgtggaagaaatctatctatttctgtgttcttcctgcagaccaggctaacctagagaacagggcaggacagaggccagtgaagagccggggttgtcagacatcatagcaacaagcaaggagaggatgggtatttttggggattcctgccttttcttcggtggtaaggtattagagatggagagttcttttctataactgatccctgccccaagacaagaccatgcatattgtaacaaattgacacagtggaagccaaaacaggggcttggaagttacgcagatctgggtggatttctgaccctctcatttgctaacagttcactctagcaatgtaaaaacaaacaaacaaataaaaactcacagcaacaagaacacaccactcctatacttcttttctatagtgggtccaagttatccaggggacagatactataatgacccggggacagtgcctagaccttgctgttactctaccttaaagtcctctgtaacccatgctcctgggtcatgtcaagccaatagcacttataggcaccaaaacactgtttagtcgttgccatacactgtccaagttatgcacaaagaagggtattccaggggtgggtttttacctactctatccacagccataaccgtagtgcttacaacaatgcctggcatgaggcagtgcctatgtggatgaatacaactggccacctactatgtgccaggcactttactgagatgattttcacatttatcataccaagtagctgcaaataaggaagcaatgataccctgttcttggcttataagaaggttgacttttaacatatttattcatttatgtttatttaaggcataaactgtatcaccctaataacacagcttataaattagtgcagacaattaacttgtagcaatggcttgtgtctcagtactatctttagttattttttcttacataacaaaatcctccccaaacctcagtgtcccataataatcattttatcctgtttctaatttctgttcattaagaaccccagtgtgggggttgagaggtgccttggtcctgcttcaactaggtgatgggacagacttagtagacttcttaagggaggccttaccctctctgtggagcagatgggagaagtgggagagtgggggtagcaggaggagaggagggaggggaaactgggattggaatgtaaaaaaataaataaaatctttaaaaagttaataagaaaaagaaccccagcagttctttgctgatacctccatcgcatgtggcactcacagatgattctcaatggcattcaaagtatgggggatggtccaggactacacattgacactgtgtaagggagagcaaaatagaaccaagcaaaggatgtaaaaaggcagaccagagatcaaggtactttgagcaacactagcattccccaaatagcatccgactttcagggaatatgttatctacacatcaaaggtcaatgggcttcttggagaagtaaatctccaaacttgatgacgccacatttcatatacatacaattgagtctttaaatataaattatacatggggagtataagggggagtccctaggcatagatataacaggaagctaattttgtaatcaaactcacaaaaagtaaccttaaaattagcaggcacttaaaccaaagcattaaggttttataccaaagcagcaacataatgaaagataaaagggccgatcagggaaagcacatctgggccacttcaaacatgttaaggtggacctcacataaccccaggttgaagtagaaaacagctgcagaagtgtccttaaaacagaagactgcatgttcaagagcacgcccacagcctctcctctcacaccccctttctgcattgatggcatggcattgggccagcgaacacatgattcaaggaagagtagagagaaagaattcagttgtatttgaaaaacaatgtcctgtctgtctagtggctttacttaaaaacatcttcaccagtgctgcaccaagagaaacacacttgtctctcagggagaagacatgctctttcctgagctgaaatacaaccaagcaagatgctgatcatggcagcacactaaatccaataacgtacatttggttcactctgaatgttggcaggttcataccagcactataagaagatgaaaggatgatactgacaaggctgtaggtacaggactcgtgcagcaaaggcctgtctctatctgcaccagcaatgtttttttacttttatttcctccttcagatccttgtatagaggggaaatatttggagaagtctgtttatggttcctaagctcatattctctcaactgagtatgtggtatatctctatactcccaggatttgggaggtagaaacaagggtatcaggagttcaaagccagcctaggctacagaataagttcaagaccaacctgaagttgatatgcagaagctagaattgaattatccttccctttttcctttggggtatacaattgaataacactttgaaatttgtctgtggcagttgacctctcagtcataaatgaaatcataaatgatctttctaccctagatcaccaacacttcccaaagacaatctgctgatgtttgctgatgtagcacattagactagcttttttaccttcctaggctgttcatacttggtacttcctttgtgggcattacttcaagaaacactatgattatggttttgatcttaaatattcccccaaatccatgtgttcaaaatttggtccccagcataacagcattccaagacaggacatctaagagatgcctgaatcatgatcactgtggccttaggaaagtatttatcaattcattgattcatagcttaacagattcttgacaggtgatagaaagtttaagagatagctggagaaagcagatcgcatggtgcatgaccttgaaaagctaattgggacctttgacccttctctttctcctttcttcccaactgtatgacaagtatactctgccacatgcttcccaccttgatattctatcttactacaagcccagaaacctggctaactgaccatggatggaagcctctggaacagggagtcaaaatgaaccttccctcctttaagtccttcccccaatgcatgaagtgtacccatggtaagcctcgatgtttatcacacaaagcaccattacagaggacaattttttgaaaggctttctaatagaggagtaactgcagctccatggaagatctgacatcaagtaagagagagaaacagggcatgacttattggtgcctgtcaggcagccagagctcctgaatagggtagaatcagaacaaaaaactaggcacagaatctctaccttaatgagttgctcctacaaggcactgctattagccatctattgctacaatagcctttgtgacatataacacatggaagaccaagctactattcctcatgtgtgcggtgccagttggaattcgccagaggaacatttgttagggcaactggaactcttccccatcagtctctcatctttcaggagacttgtccaatcctcatggcaatggctaaagagcagaagtgagcaagtccactttttcaagtaacatttaaatctctgtgttatatttgttagtatctattttccctaaagaagcagttcactgaagcaggctcctccaacttacaggaatcggtcattaaatgtgtggtaactttgagagttggctattagcttcctggtagactgaaatgaaaaataagaactaagtgcctccagagagctggtataccactggcccagagcaggccatgtggctaaagtcaaaaggaagagtcaggaataccatgcctagtgaggtcaactcaaagttacacagaaaggggagtggagctaaggagtggcaaccatgatgaactgggaacctttatttttaattaccacagatattcagtaatgccagaactgagtggtttttcaggttccacttagtgtggaaccagtcaagttcctttttattttttattaggtcatttgaagtctcatgctgattccccatgttggcaaactttctccttctcgtaaagattcatgtggtcttggtgttgcaagagcactttaagtgtttccaaggacaatggataataaaaatcagggacctgtttcttagtatttgcaattgccaaaagctctagggttgggaccacaaccattgcagaaatggaaacatatctgggaaaactgagaggtggaacccatccaaaatcaaagagttggaaagaggcatcacaaaggtcaagcacttggctgcatccttcacacaatggcttttgggtatgcacacaggggtggatacaaggaatatggaaaacccaggggaatctccccatcactgcatttaacacctgcctccctcatctatcatgtaagcacccagaaattgcatataaatctgccttatctacagttcagtatagtgcattacatattcaacaggcagctgtgtactgtatcctcagctaaaagagcttcactgcatgtcattagtatgtagacatctttgagaagccttctatgaaggcaaaatgttttacctgaatagtcccacagttttcatttatggagtctcaggatatgtgtcacttcatggggtcctactgatatataaagaaggatgtgagactgttttgattttggtggatgctaaagtttgggtcagaagacctgggaagagaaaaagatcaactaagataccatacttagatggatagtgggaatatttcagtggcatctattttgtccctctccagtcagaaaaggttgaaaaataatccccaagatttagaagtatgaaagaacaaaactcaacttttttatagcacatatcttttaggaggcaacagggttgattggctgaataatcacttgtagatcctggtatgatggtgagtttaatgtgatgacttgacaaggctgagggatgtttctggatctatgaggttatttccagaagagtttatcatttcaactgacaaactgagtaaagaattgatctcactgacgggggtgggtgacatccaatgcatgaataggataacaaagaagggccactccaattccatgtctcaacaggtctgtcaatctgcccagaacttgtactcctggccctcaggtcacctgatctacacaggggctttccaccatcagcctctagattaaggctttgttgcaccatctcattccctgattctctacttgtacagaacagaacagaagatgttttggcttcagaaatcgcataaactatctttctgtctctatggataactctaagacactagaatgaggaggtaactaccatttataaacctgcccatcactaaatagaagaaacaggctgggtcttgagaaaaataccactttcacatataaattatcacccaaagcagccacataaccacaaataacttgaaggaaatagttccctgcattaatttccaaaggctcctatcacaaagtactacaaaatatttgcctgtggttctgctatctacaaagaacaaataactaggctaaatctagatgttggaagggccatgctccctttgggaactctataccttgtctcttctggcttctgatgtctgtagacatcctcaacttattcccaccctactccagccttcaaaactgttattcttcagatcttccctattgttttcccacattcttctccatgtgtcaatctttgtctcttctaaacatcagataaacatttaggatccacccaacgatccaagataatgtcccaactcaatatgtttaaccgaatcctatctgcagatatcctgtgaagacagatctttatcgtcaaatcaactgcatttatcaccacagaaccacacctctgagtgtgtgtctaggcattccagaaaggttcaacagagggaggaagacccaccccaaatgtggacaatgctgtcatgtatactagagttctggaatggcgcattggggaagcagatttcatccactctgtcttctgacttcagatgtgatgtgaccagctgcctctggcctctgctgccttgaattccctgccatgctagactgcactgtcagtctaggagccgaaaaagccttccattaagctgcttctttcagatattatggaaacaagaaaaggacaaaaaatatccttcattcccaagggcagcactgctggctatgcaggttaggaccttatatctttgtggacactattcagcaaaagacaagctggagtgatcttatacagactcttcagatttgttctgtaatgtcatatttgtctcatttttctcatcaaatgtccaatttctaacacagaatatatccaggccacttatcaatgtgtctatcttacacccgcaaagatcattttgctgtaagtatgcaaaactattgatagacttttgggttaaggacacttttattccattttcccttgaaaaactactgttttaacatttacaaattaatctatcccctttggctcccccaaaggatctgagaatgaagtaataattccaacaaatagtttgttatgtaaacttctgtgacaccaggttccattttataactttggagccaaatcaagcaaaataataactgtgaattttgtagctctttttttttctatgacaaaggtttctgacaaccagtaaaagcagaattatgagcaaactggaagggaaaacacattgtttaaacaaataaagcccacatttccctcactttagaaaactcatgtggagataaatgaccaactccatgaatggaagaaaaagtacagtgagccatcagaggtcatgtgtcagaatctgaagagctatggctaagcaggataggcatggacgagcttccaagacctcaagtggctacagcaaaggctttttgttctcactgtgatccccttttcagtgtccattgcactcctgcctttcagggtattctctggtccccacacttacctctcaatcttcacatgaactgcactttttcctaggacactctgctctcaggcaagctgcattctaaaaactaagtcaggttttattatgtccccgctcagagctgggctggcttctcaaactagtgaaaagatgccttgtgctcaccaattagaagaagtattattgctaaaatatccatagtacagaaagtgacttaagatctaatgagccccagagaaaactccaacaatactttgtttaaagaaaaatatttttaagtcctaaaattcatatgaaatcagaaaagaatactacagccacagtgatctggaatgagaaaatgaagctggaactatatgccacctgactttacaacactggtctgactagtttttgtcaatgggacactttagagttatttgataagaggaaagtcaattgacaaatgcctccaaccgattggcttagaggcaagtttgtaaagcattttctggattaatgattgatattggggggcccagttcactggagtggtgacacacataggcctgcccaagatcctgagtagtataagaagtcagactgaataagccatgaggaacaagccagtaagtggtgtcccaccatggtttctgcttcagttccagcctcaagtcccttccccagcttccctcagtaattgagtgtgacccaataattgtaagctgaaataaactcttttcaaccaaattacttttagtcatagtgctttatcacagcaataaaaccctaaaacaacaacaaagctatagtaatcaaaacagtctggtattggcataaaaatagacacatagaccaatggaataagatagaaagcccagagacaaatctctatgtttactataaactgattttcaacaaaagttctatgaacacaaaataagttaaaaatataatctattcaataaatgatattggagaaattaagagtctacatgcaaaagggtgagattacagtgctatctaccaccatatacaaaaatctaccaaagcagcagaaacacttcaataaacaatttgaaacagtaaaacttctagaagaaaatctgtaacattggtctgggaagtgattagtttcatatgtgatccccaaagcccagcaaacaaaagcccagcacacaatgacatagagtcaaaaccttattctcagcaaaggacacaagagaatagacagcccctgaatatgcataaaacacttgcagccatttatctagtagagttcaacttttattgcttttagttgccattcaaagaaatacaagtatctttcgatgctactttgagtcttgaggcacatatccaggagtgatggagctgggccataaggtggctctgttttttgaaaaacctccgtactgatttccaccatgctgtatcagcttatattcccactggcactggatgtataagtagttctctttctccacattctcagcagcatttgttgctatttgttttccttcatattagacattctggcaggggcaagctagaatctcaaagtagttttaacttgaatgtccctgatggctaagactatgcaacactttaaaaataatggggggagggagaaaagttcaacttactgcacacactacctctctttgcttgctatatcctgaatttcattgctgttgcacctccacaacccagaccttctctctcagacttgtgcagcacctatgggaacagttccctgacaggggcagtgcatccaaacctgcctcaggcaggctggcatagctgattgtcagcttgattgcttccttaaagaaaacctgcctaggcttctctctggtttctttaactttttctctaataccatttggttttcatattaaattacttgtttattctgttttaattgtttacctctctccttttacaatttcatacactcacataacacacttcactttctctctattcccctgcatcttccattttctccttatctgcctcctgtccttatcagacactcccacaatctctgccggtatcttttagagattcataactttctattttgttttctgaggcatttagtttaactagggtgatccaagtaaatatttgattggaaatatccattggatttctcgcccagatggtggtattctgcagcccttgtctccacttttagctctgtgttctttctgcctcctatcccacaatccctaagccatacaggggacaatgttttgtttatggccaaatacttatctattacttagtctcagatgccaaaaatatacctgaaggaaagacagcatcttcattaaatggggttgggaaaactggatatctcatttgtcaaagaatgaaactagacccttatctcccaccttgcacagaaataatcaactctaaatatattaaagtccacaatataaagacttaagctctgaaactgataaaagtgagtgtagggagtgcactagcacatacagccatagaggactatagtcactttgaaaacgaaaatcaacacttgacaaataggctctcatgaaactaaaaactatctgtaaagaaacacaaacagcaggttgagtgcagaggcagcctactgaatgagagaaaatccttgccagctgtatatacaacagaggataaatatctggaatataaaaaaaattaaacatcaagaaaacaaacaatccagtcaaaaatgtgctacagatctgaacagggaattctcaaaagaaagaaaaaaaataaaacaagaggctcataaacacattaaaaggtgttcaataccattatccgtaagggaaatacaaattataactgttatgataaatctttccaacaaaggctgctgagccccactgccatgtgtgtattctatgctagccacccacctaagttagggccccaattaatgcacagagagacttgtattaggtacaatgctgcttggccaatgactaggattctcatctgttagttcagtctcaattatcataaacctatatattttataagacttatcttatagaggatgactttttctggcaccctctcttgccggtggctcacatggcgccgctgaaggaggagcgaaggggaaaagacgacactttctgtttcctttgcttaaatatgagtctccttgctatgtcacttcctgcctggatcaccacttctctactacacttcccagaatcctctttgactcctagtcccatctaacttgctgtctcattggccaaacaagtactttaatcaataatcagtaagatgaacatacacagtacattccccattatataaccactttgatcttatgtcagtcaagatgttatcatgaagcaataatatgacaagtgctagtaaggaagtttggaaatagaagcccctattcactgctggtggaagtgaaaactgaatcaaacactatggaaatcagtttggagattcatggaacgttagtcacgacctagctatgccaccccttggcatatacccaaaagactcaatatcctactgcagggatatttgctcaccatggtcaccgttctgttcacaatgctagaaaatataattggccttgtggatatgtaatgcatatgtacataaaaagagttttactccactgtctacaaaaatgaaatttgcaggtaaattgatgaaagtggaaaatttatattgagtgaggtagcacaggcctggaaagacaaatgacacattctcccttacctggatcctagcttctagtctcttattttgtgtggtacctgtagaagccaagacactagagagaggccattaaaggagggaggctttaaagaagagtgagactagatcacattaaatatttcatctcattaaatattcatctcatgggtgtggcatctaatctgccaaacatacccagaactacctatgtttaaatctattaggaactcaaactagtaaataagaagaacacactcaattataaaatgggcaagggaattgcatagattttctctacagaaaacgtgtaaattgataacaactatatagaaaaaaaagcccagcatgtgatagagacagtattttcaactcttgtcaatttcagaaaataaaagtaaagccggacgctggtggtacatgcctttaatcccagcactggggaagcagaggcaggtggatctctgtgagtttgaggccagcctggtctacaaagcaagttccaggataggcaccaaagctacacagaaaaccctgtctctaaaaaccaaataaaagtaaataacttaaacaatatgatacgtaggggcctagtcaaatctacctttcccagcagtttaaaagtttatgtctaggaggccaactactataaatggaactgtatctcccaaaatttgacactaaacaactcatccctgatgtggcagtatctgtagatgggtcttttagaagataattggagttagatgagacagtcggcatgggacaatcattgtgagtttcccatactttaagaataggaaagacagcaagctaaaaaagggtccctactagaacccaaacatgctgataacctgattacagacctccagcctccagggtgtgctttttaaaaactcaccccaccctgagctgagatgtttttctatctcatcacagaagtcctaaggcagaaacctgggatgtgtgcctttcttttatcccaaaggagacaagagacacaaatctcaggatggccaagagattttctgagcttggatggaaaagtgagctcagcccacgaagcaaacaacacaccctgccacatctgtgtgtcaactctctaaaccaaggatttgaagtaaatggagactttagtgctgttcatgtacttgccagacactgtaggccacagatgatagcaaaggtcaccaaacagttttcctggcagtcaccatgacaccaatccaagtcacagtcaggatcaaaggacatttggaagggtaacaggttctttcctatagtaaaccccgatatctaaacaactacctgtgtatgacacaggcttcatttgaaggaatataatatcccctcctgtgagaacaacaccacactctactctagatagcatattcattgattaaacaaagctacaaactccttaaccataaagaaagtgaagctgttaaacaggccaccaatctctccccctccctctttctctctctctatccctcaggtctaattatttgttaagcaaaagaaagattaggatggagctatagtggatatctttggtgacatattatctatcatttattaaagcttgtctgaggattcagaaagcaaaataaaccacaagcctagaagccaggtacacacttttaatcccagaatctagaagctagggggttgtgggacacacctttaatcctagaactcaggattaagaggtagatggatctacacaagattgacccactcctaaacagaaacagcttacacagaaatgatcttcagcacctggaatcacacacctttaatcccagcactagagggttattaaagataggagcagggtcttcagtagtcagtattaggaattcattctccagtcacactgaggatagaaagacactgaagtctcaggattctctagccacgctgaggagaggcagccggatcagcccattcagcctgaggtaagagctagtggccagctactttgcttttctgaccttcagcttgaaccccaatacttgtctatgggttatttatttatcatacaacaaatattcctttatagctaaagtcaagcagaatggctttattctaaggtacacaaaatggctggtcaaggaggcacacgcctataatctcagcactctggaggatcaccacaaatgtagggccagataattgtatatggtgagttccacaccaccttgagatagagggttgagactgcctcaagaatatttaataataataataataataataataataataataataataataataataatgaagatttaactaatttaagccaggcaaatttgccacatgagcaaagcctgtctttcccaagctcgtcagctcttaaaatcctttgttaatcttccacctcccttttcactctgtaccccaatgattttcaaatgccaccttgggttccaagctctaagaaacatatctgtaactattctaatactttttgtgagttagtttagtattgttcttgtatgtgttggtaccattaaaaaaaggatgatgtaatacagttattttgaatggttcccatggcttacctggtaagatatttcttctagagtaaaattttccaaatatattctcaaaaaacctcttgcaagctcctggcccacattcctagcagggaactgcactggagaatagctcttattcaccttatttacctcctggtcacctctgcttgaatgctacatatctacacatatctgaaaatggggtgttctgtgaaagatgaacctctagaccacagaaacagttttaacaatgaaaaagacaaccacttcaaagaaattaagattcagaaagcatcaaaagctggagaaccatgcagatgtgcaaggaaatctatatacagaaagtcacctgatcttgtggttttaactaagcaactgccatgtcacctatggacaatttacagtgtgcatcatggctggactgtatgtggatacaacctgactacattttggagttaggactaagatattactccaggatggacaagaggcaattttcagaaaggaattttaaaagtcaaaaacaaataaatagaaatggatggccaaggaaggcatccccaggacatggagaacttactagcagtgatgaattctgtgaatgcacatatgtcatcctgcatgcagtataagagagccttcaaacaggaattgaggcaattttgaaaattgtgtatgtacaataaatcctaaataagactaaaacagagtagcaattctcaactactatcttgactaagactcatatgtagaggtaacaaagctcaaagaggtcccaggtcattgaaagggtacagacctgaaacctgtgtttttaccatgtcacccaacagatcctgacacacagagatgtttaaagatcgtggatatataacactggttctcaaacctggctcccattggacgttaaatattattgatcccaacaggcatggggaaacatggtggcaatcccagcactgatgaggccgaagcaagaggatgaccatgagtttgaagacagcttgaactatgcagcaagtctcctccttctctctctccctctccccctgaaatctctctctcccctcttcttctcccccctctctctatatatatagacacacacacacacacacacacacacacacacacacacacacacacatgtgtgtgtgtgtgtgtgtgtgtgtgtgtgatcttcccccagaataattaagatttaactggcttgaatgtacttgagcaccaagatttgaaagatccccagaggctgagaagcactgagtatgaagaagagttggtatcccccaagaactataaagaagagttagtgtcccctaagaactataaggaagagttgatgtcccctaagaactgatctctatgtgttaaaaaaaaaaaacccaggcaaccagaacctaaaatccttatacctagatcccttgtttaaagacagagtccatgaattggcatgctcttcagtgagatcacagaaccatgaaaagaattaaagccatcagcatgtgagcgtcctgcacatcataagacagcaaacatcattcttggcttctacacattggacaccgtgtgataaccaagcatgcctccaggtgttgccaagtgcctccagagagtgggaatcactgctcataatcacagcacaaaaggcacaaaaccaagttcttggaggttcaacaactttcccagagacataagactaggaagtagcagagatgggaaggaaagagtcagaacacacacacacacacacacacacacagctcaggagaacagtgatttttctataatgaggaaaaatgagattcatatccttcttaccctcctcttcaaagaggaaaattaatgtcgataaaaaactttaaatcttgaaggcgattgcttcaaacatgctgtccataaactattatttgtttggttccaagatactaaaagtctgagttgactttatctgtccttattgcatccacttacatgtttatttattttcagactaggccactcatttcccacactggcttgtaattttctacgtactggaggataaccttgaacttctgatctgctgcctcccacttctatagcctgggagtacagatgtgcaccaccacacccagattgtgcagtggtaggggtcaaacccagggcttccagcatgctatgcaaacactaacctacctacctacacccccagacctacacagtattgtgactacacatacacattgctctcatgcaaagttacccacccccatgtcagccatgtcatcttcatacaaatggcccataaattcccagtgagatggctacagatgtttggctcaactattcatgttaacataattagaaattactttagtcattgtaagtggattataaattagtcatgatactttatgtctataaaagtaaggagatgaaattgaaatagatttgaatctggcaaggtggatgctgttatcttaggtgaaaacttaacactgtctgccactggaatggggctggttttgggttactgcggagtgactttggatgtgacccacagagcagggggacactttccctctgtgtcacctcagtgaggtgaaatttccatatgggccacagtcttgtgtttcagacaaatctctcctatcacgttctctcatctctgtctgcagattatcatgctagaagacacctagtaagcgaaggtgtgaacatacaggcaccaggatgctcttccagctggctaaagacagcaaaagcaaaagagaaattaaaatagaagaaaatatcaacctttgacaattaagaagctgaggagaggcagaagtgaaatgttccctcattaccctacattatgagaaagtaagaaaacctcagcaagtgaagatagtaaggattttgtaattcagcaaaactggaaattcaggcctgggagcttcagcagccatgtgctcttccatatcatacatcctgctgagcctcagcttttctccctgcatatacaggtgggagagccatggtgaaacccagacgggattgtgtatgtaaacatccttgcacaatgactgacacttagaaattatcctgtcaccttcttccttttccagacccaccctggaaaaatggaaggcaagagaaacaggtgcatgtgggtttgtttgttaacttgagggtgtgtcccttccatatctgctgaggataaagtgcatgctggcctgaaattagacttttactagattaataatagatctcaactgttattccatctgcatctccataaatggtacagactcatcctgttccagtgggagtgacctccagtaggactggcctgtacttcattcggcatccataatgggctaaaatcttgaaaacaatggaatcatgttggatacagcagtgttgatcaagcatgaggcagaaacatcagagtaccaaagcaggtgagctggacacagaagacagtggctggaaccttagcccaaagagaaaggccgggttgctccatcgctaatgattctagagaatcatctagaggctggctcctttcagaactttaaaataagttcagattctataaagtcagtgactcaatcttttttttcagtaagaaaattggtgtcaagacacatatgatttgtctgaagtcagtacagctagaaatttgtttaagaatgtgtggcctcttaaaaggagtttccttcctgagtcagacctttactccacaaagggtttcaatcactgactaaaccggaagtgccttgttcctaaggagcaaatggcagctgaatacttagagacgttgcattatcctgaatcatgtcatttcaccaaatacaggaagattgtgcttacagatgggactataagaaatgttccccaattgcgttttagtgataaccatacaaatatgtggaaatccacaagaacacatcattcataatatgtcattcaaacaaaggcattcagggatggaccacaaacaaggtaaagatttggggcatttggtaagggtggggtaacccacatacaagtggctatgtgcacttcaagatggtggaggccatggagaaggagttgcttgtcatgaagggtatagtaattgttttctctccatcttgtgctggtgccctcagccaagcccatttggaaataggaaatacaggatctcagtaatgcaggctataccagtcaatgggacaaagaatggtagaaagtagataatatgacattataggcatcagtttgtaaggaaaattaaccacagtgtgctaactttaatgtcttcaaactcataaatgccctggacatgcaactttggagggtcctcatctaatgaacctcagacacagcaaaggctacctagggcactagtctgcagctacaggcagatgcaagtaagatggtagaagcagaaattaggtatcagaggaaattaggaaatggactgtcactgaagcagagacagccatagccagaggcatagtgatggcattcttgaaggaatccactctcagagtgatgcagaaaggcactgtggaggagactatgcttctgagatgtagcccgaagcaacctgctagaaatgagatcctgaagaataaccctcccactcatgaactgtgatgaatgagagcctgtccagactgaggaagccggagttgctgtccaagtgcaatcacagagatgtcaagcagaagagagcccagcaaaagagaacaggacatgggccattctctgttatgtctgaatccacccagcctacccacatgtacactctgccccctctaaaaacaatttcctggcatccacaaggaccagatatgggtgtggtataaagacatacatggaaacaaatcactcatatacatagttttaattaattaatgttaaaactgcagaagaaataccattaaaaacagcatttttttaaaaagccaacttacataggcaaactcattaaaataacatcagacctttaagaataaataattcttgaaagccaggaaagcatggaatgatatatttcaggccttggaaataattaactgtcaaccagaattattacatacagcaaagatattcttaaatggataggtatataaagatttttctaaaatcaccacagatgtaaagcaatttatgaccaccatatgccagcattgcagaagattcttgaaacaattcaacctcccaaaaaaagacaatcactaaacaagaacacaggatagcttagacctcatgagagaatagagtgttatatgagaaatagggaatgaccagcatatccaactcagtggaacacttagcccttaacattagtaagggacaaagaaaagaacaaacagtgtgtgaactaagcaggaaaacaactttttttttttagagactggatttctctgtggctttggaggctatcctggaactatctcttgtagaccaggctggtcttgaactcacagacatctgcctgcctctgcctccatagtgctgggattaaaggtatgtgccaccaccacccagaaaggaaaacattttataaaatcacaggactcatcaaatagttcctaacaatacctcttaatatcaattattttcattccctacaagatttagactaactgaagggatgaaaactcaagatccaaccatttgcagctcacaatagaaacacctcagtggtaaagactcacatagaaagaaaacacaaaggatagaaagtacaaagcagtcagaaacaggaagttatagctactcttacaaccagtaaagccaatttcaatccaaaattagccaaactagataaaggtcactacatattaataaaggttacaatttgtcaagatgaaatttttataaatgtacatacataaaatcatagtgtacttaatttcataagaaatactactagaaataagtagaaagatagtttcacatacatcaagaacaaatagcttcaatactctattctcatcaatacatatattgtctagacaagaaaatcaacaaagacacttaagacttaaatcatctcacaaagtaaatgaactcaatgggcatctacaaactgtttcaccaaaagtaatagaatacacattgttcttatatgctacggaagcttctctagaacatgtcacatgctgggtcagaagtctagtattaatggataataagagtaaaataattctctataactaattagatcatactggaataaaagcataagacaatgacaaaactataaaacatgtggaaattggatagtgtactccagattgaataacaagtcactgaggaaatcatagaggaagtaaaaacattcctggaatcaaattaaagtaaaaatacaaccaaataaaacctttgggatacagcagaggtgatttttaagagaaaacagggtagatatcagaacctgtatcagaaattcagacaaatctcacatagcctaatggtgttccacaaggacttaaaaacacaagaaaaacaaacaaaatgagtaggtgaaaatacctagtaaagatcaaggcacaaatgaatgacatggagactaaaagaacaacacaaaagaataaatgaaaccaacagtgggtttagaaagaaaaacaatatcaacaaacccttagccaaattaaccaacatacaataaccccaattaataaaaatcagaggtaagaagggaggatactatgaacaatactaacaaaactagaggatcattagaaggcaagaaataacctaccaaagtaagttataaataacttcagcagacctaagactcacggaaattcaagtagtgatagagaacttgcaaggcctgtgagatgactcagtgggtaagacaccctcaaccgagcctaacatcctgagtttgacccttgagacccacatagtagatggagagaaccaattccttccagtcgtcatgtgacttccacgtttgccccatggcacaggtaaatcaataaatgcaataataatttttaaaactggtctttcagcattgagcccagaacctgactcatcactgcatgaaatctgaagttgctaggtttgggtacacagctgtttaataacacctgcattgaaggcaagaagatcatgagcacaaggccagcatggactacatgggaagaccttgcctgaaaattgaataaacaccaaaagtaagaggtgtgaattctaatccaagcccacttactagtttcacgagaactcggggcagtcaataagtcctccagactctggctcgctgcttgtgaaatgggagtgatgcctccttccctacaggaagctggatgttggaagtggacctgcaaacagtgcaactgtcctggcactttgcactgttcctcccctctctttgacaaagcagccagtgagagccaccgtcttaagactagcagcttcctccctctactttaaatgcccttcctctataatgaaattgatgactaccttaaataccatcctagagccttcacccagtggctgatggaagaagaagcagagattcacagctaaacactgagctgaactcctggaatccagttgtagagagggaggagtaatgagcaaaggggtccaaaccaggctaaggaaacccacagaaacagcttacctgaataagggggagctcacagaccacagactgataactgggaagccaacataagaccaaaccagggcccctgaatgtgtgtgtcagttagcaggccagggaagtctatgaggcctctggcagtggaaccagtatttatccctaatgcaccaatggactttgggagcccatttcccatgaaggaatactctctcagcctaggtacatggagagtgcataggcactgccccaaatgatgtgtcagactttggtgattccccataggaggcctcatcctccctggggagtagatggggggtgggatgggaagaggatgggggacatgggaggtcgggaaagaaagggaactgggatcggtaggtaaaataagattgttttgaatttaaattaaaaaaaagactagcagcttcttcttcaagagtgctttgcccatgattacctcaaaaatattcaggtaatatcagtgatagatgactagggggttagcagggctgatcatacaagatcaagtagccatttgtgagtataccatgcttcagtacatatgtctttacatagccttgttttgaagtatccccaccatcggatcttgccttctcacctagagagtctctcctacagggtggaattctgggtcttttcttttcaggtttatttttattttatgtgtataagtgtctgcctgcttgtatgttcgtatactatgtatgtgcctggtgcctatggaacccagagagggataagatcctactaaagatccagacagttgaggcaccatttgggtgccaaaactaaaccttcttcatgaaccgcaagtgctcttgaccactgaactctctctttctctccagcccacctgtgtctttctggatgactggttagtactctgatcatgaaagagaacattagatgtgaagagttttgtctaacctgatagtttcaggtttacaccatctatagtgcctaccaatgctattttaaaaccattttttaagccactatatttgaaagttttggaattgttctaaaatatttctggaaaagagtcaagttatatactgagaaattttcccattgaatttgtgattctttgccattcatttaatcccccaactcctaccaaagtcaaagtgattaaagctaagaaaaaaatgtattaaaaataaaatctatttaatatttaatggtgtctctcaggaaagacatagaggagtccccttgctgttcagatgggtccaaggagttgattccttctgacgggtctgggaaaacagggataacacagtcccagcagtgaagcattggttcacggagaaaggacgctgcctggacagggaagttgctgtggaaagacagctgcagggccttgttctcaaaggccacaggggttaacaagtcaggcggactgatggcatcttgtaggacacggtggagagcatcaaagtgcgctctgtaaatcatctgctaatgactccccttgaagctgcttcaaaggcagaagactcgacccaggagtgatggccctaagccaagaaaagggggttctgcaccctaccctctagggacaacagccacaaaggacacccgaaagaacatctgcagaattcaacaccaacaagcacgaaagcctttgtctactttggtattgtcccagtaaaatgctttagaccgggtctcttacaaacaacagggacagtttctctcagttttggaggctggggaatccaaaaccaaggtgctggaagggtgtctgctgaaggccacttcatgatcctaaggtgtccagaaacaggacagccagtcctcctatggcagaagggggaagggaaagcctgctatagtcctccattaagcccgtttgtaagagcaaaaagttccatttatagaagaatcacaccctggccctaattacctcatcaaggccctccctcctcacactgccacattggcagcggctcagttttggggtgaacacattcaagttgcaagcacgatagaaatggccattgctctagcccttttactctcttggtagacatgtttcttaaagtctaatgtgtgatttgtgttcgtccctttaaacatgtcttacatatgtgctcacatcagtggcgatacaaataaccttcatcaaacattaataataatgacaataatattagccctcaaaatttatgacagtgttatttggacaaatacttttgtgaatgtctctcctacttaatatttgctgggtagccaaggtgactattattctcatctggggtaagaaaagtagaacatggtgaatgttaaacactgttctagatttttgcatgatgattaatttccttttcttaaaatttagtgtgtgtgtgtgtgtgtgtgtgtgtgtgtgtgtgtgtgtatgtgtgtgtgtatctgtgtgtgtatgtgtgtctgtgtgtgcatgtgtacatgccacagcacatatgtagaggtcagaagacaactctggatttggttctctccttccatatttctatagatttaacactaggcaaaaacaggatttaaattcacatgtgctcaggccacaggagcacaatcctggacttcagtgggggactcatctgaagatgccattagcattaacccacactcttaaacctgtaatgggcaaagttagtcagcaactgcctgccaggcctagagaaaattttctctccttggttacttgcttcttcctggggtcgttccattcacaacagcaccttccattgactgtatacgagaaggctgccgaaaagcgttaacaggaggcagctgctggaagcctaaggaaggtaaagtaaatctcactctgttcctgttaaggaaatggatccaggtactgatggttcagggtgtatggctcttgacactccatgccatcaccttcctttatcttaattcttaagaatttttttaattagatgtcaaatgactgttagaatttcaaatcactttaaaacatgggagacttggccaatatcactaggaagtaatttgtatgtcatgtacgtattgtttaggtaattggggcagatttctttcatttaagctagggccactgtgcaaaactggtgcacttttcccaatcacataccctagttatgtttcctaggtggcttgacaaatcagtgctacccctagtttggggcttctaaaaagtagattctctaagaagaattcaactagaatttcctaatgtctctgctaatctcttagcagctgcaaaacctagagtcaataaaactaaagtgattgtgccaaaatgatacaattgttacttctgcaaggagcacagtcagtactctttcaaattgtttgtccactcttctcatcctgccagcttaatagagttaccagttgttattcatgctgcatgtaaaatggattgatgtttccatagcaaggtggtaagttttgatggattgtttgaaaatgttatgattctcctcactgcataacacagaggcccctgtcccatgattctgctggcatcctctggctactgtgctcacttcctcatcacctgagtaagtgtttaaagtcacttccacactgccttcgggtgcctaccaacagatgagaatggtcttttcctgtcatcctgtgatgacctcagcatttttatcaacagctacgatgtttattcattcactttaacctctgcctcttctctgaatggaaactccattcagcacccgtatgtattcagaaaccttcagaagttgattctgatactgactgcctagccaatgatgaatttacaactactaaacacaagtagagcttcgagtgcaaattggaagtgatctgttacagtgggtgaattcatccagaccctcctgaagagagctcctaatgtatgtatctgaataacatgtaaggtcatggaggtttattttatggggtgtgctttttacttcatttcaggaaggttttatttgagaggttaggatctcttgtaaaccaggctagacttaaaatcaatatgtagctgaggataagccatgctcctgcctccgtctttccattgttgggggtatagacatgtaccaccatacccagcatggagccatggttcaaaagggaggcattactgatacactatggccaaggccagggagcaaaaatgtaccaagcccagaatctcagaaaaagtcctacattctactacagcagattctgcagtagttccagaagtcagagagaagagccaatgacctaaagtcccccaggtaaccagatgccaacacattagagacaggaaggccccaccagccacctttaaagaccctgcctgagagtcttcaagcatcaaaatgtaccaagcttaccacacacatagcttctgtagtaactatcttctgaagtaactataaaaaaatgcttacaatttttaaatatctttaaaataatctgtattaggtcaattccccagtctctttgtagaacaacaagacatgtcaaacacctagtcaccaaaggtagatggaccaagtaactaagcaacagacaggaagttactatttctgtattgattcctattaacactggaggacttggagcctttcaatgctggtgactggggtcaaaaagaaatatcctaaatgtactcaaatactaaaaataccatcctattactcaaagtgacttacatttttagaaccaaaaagacttcaaaaagtgttcgtgtaatctgtccagctcagaagaactatttccagttgacaaagccacactgatgtttttctgctttaacgttaagcaaaagttaaacagacttgagaagagcaaagaaccaataggacctttccttgggtaagaatgggttggaaaacctaaacctaaactgacaacttggttttcaatgcagacaaccacaagtcagaagagcctgaaaatggaaagaaaggacatgcctgtatggagtaagaactcagtcatcctggtctgtatttaactagtgacacatggattagttggaaatcagcagtgtggtaagagacagaatcacctttagaactcatggagtactggaccaatatgaaagagtgccactggttcatttagccccatcttttttcaaatgaggaagctgagacttggggaataaaaagggactgacgtgtacattcatagagccaatgaggagagctggacccacaatccaaatccctattgccctgtagagcacacattaaggtgctgattcttgttgtatggcttgtttgtgtgcatgcatgcatgcgtgcgtgcatgtgtgtatgtgttgagatttggcacatgtacacatgtatgagcatgtttgcaaaagccagaagttgtccctggtggatgacttcctccatcactttcctctgtatttttgagacaggttctctggctgaatctggaactcaccaagtcagcaagactagttagtcagtaagccccagggatcctccctccattgtgctgccacaataccttcccttttttatagtgctcagaatctgaacttggatcttcatgctctcactgacttggctatctctctaaccccttgtttctttattaggtgtttattcattttaagcagggtcttactgtatagaccaggttgaccttaaattcctggcaatccctgtgctccagcctcttaagtactgttattttaagcacatatggctatttctggaggaagggaaattctaagagtggataaagcagtcagatctcagtatgcaaaagaaaatatgatgaaaatttcattgatttctatatatactttcttcatggaagatcttgatgaaagctgggacagttagtcatttctcagtaatattagacatttgtgataaaaaagagaaagaaatacaggactgagagaaagtaaacacatttagattttaacctttcacttgaataatgtcaacaattcacatagaagtaacatgttcattatgaatatgcaaccacacacatgtgggcacaagaaatgtgactttgccatgtgaaatagaaaatccaatacaatttctgcattgttgtacctgtgactgtgttacagtttctaggagttttatagcaaaaatcctgttatccctctgtctgtgctggttataattacagtgaggctggtgatacccacaaggtatcagtaatggaaggactctgctatctcagtgtggagcctgggaaccactgctcagattcctaagtcaaattttggggagcaatctgccatctgaagaaagttacagacctctctgagtctagcctcaattaaaaaatgttgacattttgatcattatagggagtttggggacattcaatttttttcaacactgtactaaaatattatgtgtcttcaacactggaattgtgtacagtcaagtcttatgtttaagtcaagtgccccacttgcctacttaaggcctcctgttaagtcctccaagaaggcatgtgacacacagggtatctacccatcatacaagacacaaccactataaaccttggtttctcctgtaggttctaggctgtcctctctctctctctttctctctctctctctctctctctctctctctctctctctctctctctctctgtctctgtgtgtgtgtgtgtgtgtgtgtgtgtgtgtgtatctgtctgtctgtctgtctgtctgtctgtctgtctgtctctctccagtgccactaattctatccatgtgtattttcatgcccttctttcaggagtctaagttttctgggaagagaagccaagaactggatggagcaggatggatactgttgcctcaggcactctttcagccccatctacagccttccccaagacaaagatcccaaagtcaagactagaatagatttggtggaaaaataagccaagtaacaaggtaaaggcagatgagtacagaataaacatctcgtaatctatggccatcagagatatcaagaagcaaaggattctgcagacccatagtgtctaaacacaagtgtcattgctgaagaaaatcaactttcactctctccagtgctgaggccaacatccatctcattaaatagggaagcagagagtgatgaggggtgaagatgatggatactagcatcacaactcattcagcacaatctgacacacaaaaaaataaaaataaaaacaactacagatcccttaagaagatgtaggaaatacaaacaagggaaaatcttatcagagaggcaacaatgttcaacaagatctaaaaagagttgatagaggttggtgaggcacaagagagaagactgtgaaaggcaaattaaagtaaggatataaacataaagaaaaaacaatgtgttagtatttgagctgaagagagtgagtagggggagaagctaactccactggagatgtcaggagttggctctattatgccaagcctggtgcacgttcatctcactgaagtagcccagaggagatgtgagtgttcatggcagctctgactgaaaactaggcacagagagtggccatgctggcagatgtgaagagaccagagaggctgaaccccctgttcaaacaattaagagagatgtcctcaggtaactgggagtggggggggagggtgagccaagaggaacatgggccagcatgaatctagaattcaacaagcccttaaaaggtacaaaagaagaaaaacactaggaaagaagggaaagaacatgagaatgaacagagaaaatctacatcaaggaagagaaaaaatgatgtggcagttgagactgacaccttggaaaccttgggagaatgtgaagaatctataagcatctacatacaaatatgagcatctcagaacatagagaaatgtcttctgagtatttctttcctgtccatctgccacagaagctgccagccattgggtgggagtggtgctctgcgcactgggtgagagtaggtgtcccaagctcttcattgcccttgaccttaattaaacagctttttcactggacttttgtagtggtctatagaatattttatctatagaattatctgcctcatgggccattttaacagtcccagtaggcaaagaataatcatgtctgtaaaggacatggtcctgaaaatgaaaaggagaaggcagctcacacccccctttacattcgagttagcaactagccactgagatagtatggtaaaatatcaatgcattatagtttcagttcaatacttttatatggaatatatataacttaaaaacattaaattaaaaaatctaactattcttccaaatatgtatttttatcatgtctaacagtaaagatgcatttttagaagagatcaaatttcttcacaaaaatgtacccatatctatttatcaaacacattaataaaatgcgactttatgtggtttgtattatttttgtgggtttttttcacttatctttcttactttatcttattctattttcacttattataatagtaatgttttggctaatttgttgggaaatactaacattagatacggctttctctttatatttgttttttacattccaaccaaagtttcctttccttcctctcccccaacatcctgccatccactttctcttcagaaaagggcctcccatgactatcaaccagcatggtctatcaagttgcagtgagagtaggcacctcctttcctattaaagctggatgaggcaacctggtagggggaaagggtccccaaagagacagagacagagacagcccctgctcccactgttaggagtcccacaagaagaccaaactaatagaatttttcagttcattttgatgtaaacacccttaacaatctaaggcataaagttatgaataaaagataaatacatattctatacatttcgttcttttcaacattatattattatagatgtttattaaagattaaaacactcaatataggcaggcagtgttggtacaggcctttaattctagcacttgtgaggcagaggcaggcagatccccaaattagagtcaacagagtgagttccaggacagtcagggctacacagagaaactttgtcttaaaaaaatttgtgtgtgtgtgtgtgtgtgtgtgtgtgtgtgtgtgagagagagagagagagagagagagagagagagagagagagagagagagagagagaatgagagaatgtatatatgactgtacatatgtatatagaaatgatgcaggcaatttatttaatgacaaaaatgagcacatccctcaaaagattgtttggctgaatgaaaaattcttataagagaactaaataactgaatctctcaatattgtttgctgtccaaaaatgacaacaaataaattaacacaagcctcacaggtttttattgagtgataagaaaaggcagcatcacaagacagagttaacatgtcagcaaacactcagatccagttcattcagacccacagcagtcttacaggatgctcacccaaaccttggcagaaaaactgttggattccagcttctaattccaacccatttgccccctaactcagtttcttccagaatcaaatgaaaagtttgaactgatcaagcttatcagagacaaggaaggatcttgagacttccttccccaaagaaagaggggagccactgcttttctgacatcaattactgccccatgatgtgcctgtaccccactctgccaggttttcagctttccaagagcatccaaaaattacagctaaatgtgatgcctccaaccttttgattggctagcaataaattaagttgttaaaaaaaagaaagggagagagagagagaacagaaggaaggaaggaaggaaggaaggaaggaaggaaggaaggaaggaaggaagaaagaaagaaagaaagaaagaaagaaagaaagaaagaaagaaagaaagaaagaaattaaattacacttctgcttttaaccaagaaagagtcacaggggtcagtctggccttcattccccattcacaagacatcagttaaagaggaatggtagtctgagagaaatagaaaatgacctgagcctccactcatccagcttgtgagaacacacagttcagtggagaaaggatagtctatccagcaaatggttctgagaacaactgactgttcctgtggggaaagtaaaccttcattaatacttcagaccatgcatgaatttcaaatgcatatagacattaatattatgtctgaagtataaaattatgagtcaacaatgaggaaaaccattgccattacaactttggggtgaatctcaagataagtattcaaagttgacaaagagaaaaataacaagtcttatgattttagaaaatgcacaataacaaacaatgaactaagaaaaatgtaaaataacctatagcgaactaagccaggtgtggtggtgcatgcctttaatcctagcatttgagctctgtgaattcaaggtctatatagtaagctccaggacagccaatgctaccttgttagacactctctaaaactgggtggcactaaaactcagggattgtctggagggactgaaacagaattacaaagaggcatgaaaacctttggtgctaagtatcttgactacaattgtggtttcaccagtatgtgctttatccaaatgatggatttcataggtgaacacatgtccaaacacttcaaactacttgataactcacagcttattatgagtcattatgccttaagattcaccatgtgtgagagtgtctgtgtctgtgtgtgtatgtgtggtgtgtgtgtgtgtgtgtgtgtgagagagagagagagagagagagagagagagagagagagagagagagagtgcaaacaatacccaattaaaggcaaaatccatcatgtgggcttctacttctcagagtccatgtttgaaggcatctggagtcactttctttgaaatgaagccaagaccacagcttacattccatttctatagatagtgatgttacaacagaaaaactctagaaaatgcttgcagttgaaaacctggatatatggaatgtattagcatatataattattagatgtttacaatgctatgtcatcgtttataaaaccaagtgctcattttcagcacactcttactcccttgctatttggcaaggcctggcagtacccaagacaggggaaggtgcaaatctacctcatacgacattccaggacaatgtaacctcacattcaaaggaagcaaggattgctgttaggagggatcctcctccatcggcctcccttcagtactgaccctgaacaccagtgggttcggaactctgtccaccccacagcgtcatacgcacttttctcagggtgttgtagaaactgcactgacattgatatttgcatacacgaacagggccatgtcccaggccacagacacactccaaaaccttatgcacagatagtcaccctgtatccacactgtgtgagcacttaacagacacaagatacgcaggtgtgcagacttgcctcttttccttaaataagtcatggaaatgtgagtacctctctgcttctgagcagttttccaggtctaagggaaactacccagggaacgcagaagcagaggtgaatggctgtctggttcccttgtccttaccctccccgccagtattagttttcacttgccatcagataagccatgtggtgatggagttgatagaatccagttttgctggtgcaggcatatttcatggaagactgttacatgaaaggggggtctgaggaatgtcatttgttctatgtcaaaacaatgtgataaagagcactatggttgatgggccccctcatttaagtcagcttgatgtaggtgggaccctataagaccccattctggaatgctgttcatgtgtgagaaggcgccatttgcaggctgtgtgctttctttttcctctttagtttgttggttttgaaaatattgctggtggcattaaaagcaaagacacgggagagttttcattgatcaaattacagtttgaggaagtgtcttctacaccttgtttgtgaaagttcagacgggtgcctaataggaaaagtaaacaacacctccccacaattgttcacagtctgctccacttcattaattactgctggtctgcagttctgaacaatccatttgatagccggcaattgcacagtgctgatcaccacctttaccgggcaattagggaaaaggccattttctcccttaaagcccattgaagaaaaccgaccaagaacaaagatgctactaaggcaagtgaagctctctcaagaattctacagttgaaccataggtagattctctccctttttaaatgaacatttactatgtatgtgtattacagatgcagatagtatggctggccaaatggaagagtaggtgagacctcacaggtatgagaacttgagagctggtcctaaaaacccacataaaaaatccatataattagagtctgagtgctggggagtaagtccctggagctctctggccagatagcctagactacacggtaaattccaggacagtgtgagagcctgtctcaaacaaatttagaaagtgtctgtggactgatacccaaggttgtcctctgacctctgcactcatgtatacccccccatatacacatatacccacagacatgcacacatacaaatacatagagcactgaattaaaattcataatgaatgtttgagatatttatataaaaacataccaaggccacctgaatgttaaaagcaaattaagagaattgttaacccagttagttaaagaatttccctaacaaggaaatctaacttcaaggagcatactcgacactatgatgaagacatgcatttaataaatattctgataaagaaagtaagtctgggctcttaaagagacaaaaatgtctaatattcatgtaccatttattatatgctaggtactgcactcaaccttttttagacaacttattcagagctcaagactatgctctgaggcaggctcaggctctatgcctgatccacagaagtggtccaggaaagttgaattaatatctttgtcccatcattttcccatttttctatgatttaggagacagggtctatggggctggtaagacttaaggaactggtataatctttacttttctctattatcctggtacctgttatcataggtaaaaagtcattgccaatggcctatttgtcttacaaatgcctcctgatatccacccatagcacatggcatagactataaataagtgagaactgtagacagaatgcatgcaacgtgcaggcaagcttgtagatgtccactaatctaaaactggacaaatctgcacagttactagcaaacacatgggctgaatttcaggtcagctcctctctttcaatacacagtgcttggttttgtaatagcatgaggattgccttacaagtgtcaccatgatgccgtagctatatagcatttagcctcgtttgtaatttgatgggacaatcaggttaaaaagttccagcagttgagttttggaagaatattaaaaaatccatcaaggttctctaacagcataattaaaagaacttagaaacttataaaacaatctgccaaagcctccttttaaagaactactgctgtttgaaatgtttatttttatgtgtatgcatgtgttcctgtgtgaatttacgtagaccatgtacatgcagagacctgcagattgacaggcagttgggatctaaactttgggtgccgagaactgaactcaggtcctctgcaagagcagtaagcacttctaaccactgagccatctctccaaggccacaactatcactcctaatgcagaacgatttctcgatgttctaaagtcaaagcaagaaaaagcacaacatacaagcctgcaagtctgatttcaaagttttgtgctcattattgatcctactaaagttgtaacctcctcaaactacagaagtgaaactttgattttatgaagaagtgaagtgtttccaaaatgctcctttggagcctcctgccctttctatcggctttggagttgactgtatttttctcccactttccccttcctcctgcaaacacagctgctctatgcagccactgggacacacttgggggccatgggcacctccagcatggattggggtcatctggggtcattctctctatattctgttcttctgagaaagatggggatagcagattaagccagcctcggtctatagaagaatctagtctgacatttatgatgtctggggtagagcaaggccagggcacagagcacatgcagatgtgccgagctcctaacaaaaagtgcagttgttagagcaattattacaacagtgtccacaaaccccagacatctttgccatccaagaaggtgacagaaaaggactctctagacagaggtcgcctccccgctcccttcagcatctggcccatcagctctctaaacattttagtggcaagagcagctcatgacaacagcaggaagtacccaggaagcttccagaatttgccatgaggcaagtgaggtgagggaggggccacttactcctcacagctaaacagggtccctctccacaacccccagggagaagacataaagcctgtgtaaacaaagatgcttctggaaaagtcaaatggatctccattgctggaacagggctctgtgttcctctgtagctatacaaatgctgattaattgcataatattctgctcttagccggtgctgccttccggccttaggctgcaagcctccacagctgcttcacttggcttcaggcatttatgactttattctgaacaaatcttgaacattttcatttgatttttcccaactcaactttgcaactcaaaatttgttttagattttacggtcctttttcagtcccccctcccctcttttccccccttccccttcttccagctgtggtttggaatttgaatagatttattttattttatttttattattatttcttttttaggccgaagcagatggcaaagaaaggaagttttcaaaagggaaaggaagggcagaggagccaaacaagggcagttgctaactctccgtgtcccctcagaacaagctaaaacctaatactatataaatattgaagtacacaggagaggcaaaatattcaataaacatttgctgtgaatggaggcattaggggaggcttaggccccgcctgaattcccatgaaatttgtaaatatttctttcatttgttctccatttacaattagttgcggtcaagctgatcaaagccagaaggggcctgctgcctgtgaacccgcatccctcacaatgacatccacacagcagaatgaaatatggaatatcaggtttccacggatgtatgaacttgtaaaaaatctgaaagaataggaggcttttcacactgagtaatgtgaaacatttggtgcaggctagaggcctgtgaagacgggaagagagctccagagtccccagatgctggccccaaacacaccagggtcttccctgggtatccagaggctcccagctgtgcggaggacctggtgtagaagcccctcagaggaaggagagcaggccccatattccacccaggatgtgagttggccagagtgttctactgacccagctggccattccagctccctctgggcctcagcatgatgagccactctgcacccaactccagaaggcattcaaacctcttccaactcacccatttacacaccctcttcaagcagataggcgttggagttaactaaacaagctcaattgtgtgccacagaacagcattcagtaaacacacacacacacacacacacacacacacacacacacacacacacacacacacgcctcctctccttgcttttcactgtcagctggagctggaccatcccttttggctaatttggggtgttttaattgttccctgtgagtttcccaactgccaattcgtcatggtgggagataagaagggaaaatggaagtctgaccaagtttccatcctttcacctccacaagtgcattcggtcacaaggcaatgtctcttccattaaccaggaaactgagccaccaccaacaccgatggcatcatgaaggtcgttccacaaggacttccatccaatgctgtcagtggctgtgcactctgtgctcattttcaaaaggacaacttacccaccccttgtgactcaaccctctcctcacccaaaggggctgccgttcaatcttgtctcctccctatatttttgaggtggacaaactttgtccacagtacattctagaaccaaaacaaccaggaagaagagacgtgccaagctcacagatggggaacgggtagttgggaaggttaaaagtcagagggaagctgagagggctgggtatgaagggaggacaggcaggggctaagggcacaggggtagagcacctgctaagcatccagatggcttttcaagaagaaaactatgaggaaaaggggggagggagggaggagccaaatgggaaagagaaggtggaaaagagagagaggggaagggaaggagagaagggaaacgagaaagggatgagaacaaagaagatgataagagagagcagagggaaggggaggggagaagagagtgggaaaggacaagaattaggcaaacaccttccccacccctccccctccagttctccaccctcattaactcagtaaaagcactagaggaagctccagtagcctgtacaaacagcagatgacctcaggggcacagagaagtcacctttgaactgaaagccgctgtgtgacaccaagctcttctttcaggggaagtgtgtcaaaggctgcacagacaccatcctgatgctactgggaggaagtcaagctggcagctcctcagaatggatagaaacaatcctcaggctagaaagtgagcttcaactggagtcgggagaaacatgatgtgacctgggctaaaagtcttccactaataaatggtgttatcttagagtcttcaggattcctgggcagagcagaagttttccaagttaacagagtcttcaaatgcacgtggaacaaaggttggaccacaatcgcattgcagcaattgcgtcacaatttgaaatgtcatgagtcgggatcaagtgaatgcaggctgatagcctggaagaggaatgtgggcaatggaagctgctattgtgcctgtttttcaatggctacccagcatccttttcaagaaaataattatgaacatatacgagaaactaccaatgttagttgcaacccagtcttcatataagaggacatattcacagactgctggtagtggacagtgtttagtatttgtagatgtatacaaatacatacatatacatatatatatatatatgtgtatatgtgtgtatacatatgtatatttatttgattgtctacatttgatatataatcctgggataatggcaatactgtttccctaataccttgctttattcaacatgttgttcatctggttggtccttgctgatgtacataaaatgctccttgtttgtggctgtgtgacattctaatgtgtgacagcagcacactgttttatttacagatatgtgtgtatgcattttgtatgtatgtatgccacatgtgtatagttgccacaaaggccagaagagattgctggtttttctagagatggagttaacaggcagtcatgatttatctaacatgagttctgggaactggtatcagagcatctggaacagtacatgctcctaactgctgagccatctctcaagcccaaacacatttttattgatacaaaataaaatatttacatattatatgtaactgattacataacatataaatatgttacatgttttgagagttccttcatctccagggctcagttaatcccaaatgtttaccggtaatttaatttgcattcccccaggcaataatgaattgactaccaatttgccatgcaaaattgattctccaaaaggcatttcatttgtccattttttcctatcatgtcatttctcttgcttattagtaaacagtaacttaattacccagataacactgcctttgattgttgttgtttgtttgtgttgggtttgtggttttaaattttaaaacagagtctctctaaaaaacccaaactggcctcaaactcagtccttctgccttgacttcctgagtgctgggatgataggtctgtaacactatacctggctttctggtactttcagtgaacagaaattctaactgtagactacaccaatcaatatttccatttgtaagccatgcttgcttagtccttccttacccttatgttgtgaggacactcatctgcttaatatcaatgcatgttataatcttgcctgtgtcattggggtctgagggctatcacccatttaatatcaatgcacgttataattttgcttgccatagggtatgaggattattactgtttaacatcaatgcattaataatcttgcctgtccattaagatctttaagaaacaacctttaaattttgcaggtgtatgcatgcaaaagttgatgacaggcatcttctttcatcaatctctccctgaatccagaacatgctaattctgcctagtctagctagccagattgctccagcaattccctgtctctgcctcccaagtattgggatttcaggcaaccgtgcctgctaatcttttgacatggggtctgcattccaaactccagccctcagctcttgaacagcaagcactttatccatttaaccatctccctaatccaaaatttatttcttagtataagagcatcaagtgttgttaagggattcccgcctagtttgcagcacctgaaataacacacaagacactatattaattatgaaactgttggccattatctagggcttcttattggctagctctgacttaatttctaacccatttctatcaatctaagtatttccaagtggtcttctcttgccagagaaatgtccagaaacatgtcactcctcttgtgtcctacatcatgactccttgtgcctgcaccccctagaatcctccttgtctcctagtcccacctatcttgcttccctattggccaacagtgtttttattcatcaaccaattagagaaacatatatacaaaagacttcccccatcaaagtgtctttattttccagtagaaaaccaatatctccaaactgtttgcaaaaaaaaagaaaacatgtggagcaaagggaacttgcattgattgttggtgggtgtgcaaacttgtacagctactattgaaatcagtggttggttcctcagcaagatgagaattgatctacctctagatccagctatactattcttgggtatatacccaaaggtcacttcatcctactacaaatacatttgttcattcatgtttgttgcttttctattcataatatccagaaattgaaaacaacctaatattcttcaggataagaatggataaagaacatgtggtacatttacacagtggagtactactcaaccatttaaaaaataaatttgcaagtaatgatggaactagaaaaaaatcgtccaaatgaattaaccatgacccagaaagacaaatatgctgtgtatttgcttatatgttgatattagctgttaagtccatgatagccaaacttgtatatatatatatatatatatatatatatatatatatatatatatgaaactgctaaataatggaaacagagcccctacaggacatctctgatcactaaatgaagcatctagtaccagtaccaggatttggttacatctaattgagttgttggccaaagggatcccattgaaacccccaaacaacttatgctgtttccaagactaggttgctttccacaaactgatgacaaagccccaatgctaaagacaacacctacacaactaattgaatagggaaaagttgagctggtgcccacatagagccttcacccctgtgtgctggcatctttggtataggaaggtactctgaatactgacaaaagagaaatgcaaacactgccacagccacaaaccttcttatctacaatgatatcctgcctataaggtatgctaatgcacaaagttttcaagagtaaccaaccaatacctgatggcccattctatgagatagaacccatacctgacaactattttggggacaggagccagagactgaatagggtcaaaccacataccactattctaaaacaaacaaatgaactattggcaataaaattattcttgtattttctgctatacttacagatcagtgtcttgctcagccatcatcagtgaagcttccttctgcagcagattggaataaatatagagacccacagcaagacggtgtgcaaagagtgaaagaccttagaacactcagccttaaactggatgtctccacaaaattcctcccttcagggctcagggaagaagaggcagaaaaagtgtaagagccagaggggatggaggacaccaagaaaacaaggccatctaaatcagcatgatcaacacacatgtaaactcatagagactgagtgcataaggcctgcacaggtttgcaccagttggggtcctagaagactctactgtggacatcatccacctctgttttcttccagtgtttcttttagactgtctttccatctagccactattcctaggtggagatgatttgagaagtatacaaatgccaccatccctaatccaaaagttagctccaatcagtaaccacttacaaatgaaaatttagtttcctccaagaaagtctcactggggaaacaaactactcctaagggtaggctgcatgtccagcagtagacaggcaacagaaaatgaactcaatggcatccttgtttcataatgtcatatcagggctctttttgttttttgtttttttttttaattttgtccttttttagtttatattattgatttgtatttatatttattttattttatatttattatgtatttattgcttgtatttttcttctctctttttacccaacagatcctttgcatatattatggcttccagtttagtgtttttgtgggattcctgagttagcaaacaagtgggtctctatttcctgtgcttctcttgggctcttatccttctgtttgttttgtccaattccaatgcaatactttttgttttattttattttatcattatcccagaaaagcctatatgttttctaatgagagacataaagggggtgtatccatatgagaggaagatgaggaggaactggtaggagtagagggaagggaaactgtaattaagttacaagcaaaaaatctatcttcaataaaaagaaaatatatatatatatatatacttcccttctgctgggtcaaataatcataacaagaccaacataatcatgggtgtgcttctcatctctccagtctgttcaagtcgtccattttctaccctctggaaagcatctccagccttaatagtggctagtggaaagtggctagatggaaagacagtctgaaagaaacactggaagaaaacagagatggatcatgtccacagtagagtcttctcaggtcctcaaattgaagattgaattcacagccactctttcttcacatgctgcttctgcctcattctctgagaagccactgtcacttcaccattcctgttttccccttatgctgcagtatgaatacttgaccctactctggcttccagttagttcattttctcatctgctgtctagtctggttcagttttaaaccaacctggtattgttattttggtcttgtatttaagtgtttccttttgtttttcaatctttgccaactcttgccatgcatgtgagcttctgtgaactggctctaagtagctgctttcagcactgtgtctggcttttctgtgccctttggtctgaggttttattccctgtcactggatgtgagagtctggcaccccagtcattaccctgataaaaaatgctatgtttgaaaatttattcttgcttttcagcctaggtgacctgtgaagatggtttgttactctcttgatccagaaaaaccctacaaaatcaaggggttcaaatctccaggttcactttaagaacatctgtgaactgcccaggccatcaagggtatgcatattgggaaagccaccaagtagctgaaagatgtcactttaaagaagcaatgtgtggccattccagcagtataatggtggagtcggtaggtgtgcccaagccaaacagtgggctggacacagggtccgtggccaaaaatgagtgctaaagttttgctgtgtatgctgaaaatgcagacagtcatgttgaactgaagggtttagatgtagattctctagtcattgaatgtatccaggtaaacaaaacaccgaaaatgcgccaatgaatttacagacctcatggccagattaacccgtagatcagctccccctgccacattgagaagatcctcaatgaaaaggaacagactgttccaaaacaggaagaggaggctgcacagaagaaaagatatcccaaaagaaattaaagaaacaaaaacttgtggcacgcgaaccaaaaaaaaaaaaaaatacagataaaagttaaaaattattctcaactgtagtgggtagacagatctgtggtagtactatttaactttatataacaatagttacttaatgcttcatattcccacccacttaacttatagactcattaaggtttccttatagaatctggttttgtgcattgcatagattagaattctcctttttcctttctaatgtttatgtaaacttcatttcttttgtctctctttggttgggaatttcaaacaaattaatggagtgctgagaagtcagctttgtctcattcagagtcttaaagataatgttgtagtcacattcattgattttaaaacatattttaaaagcctttaatcaaaacagcatggcacgagcagaaagatggacacataatccaacagaacaggccaacagactttttacaaagacgttaagcacaaagaatgagaaacagatggagtagggagcatacagttatacctgcagaagaacaaatgcagggggtcatctaacatcacatataaaaatcaacacctaatggattaaagaagtataaaactttctgaagaaagccaggagaggaagctctatggcactggtctggttggtactttttggatgtgagcccaagagcaaaggcaacaaaagcagaaatacagaaatggagttgcatctaaaatccttctgcagcacagagaaaggagttggcaagagactggtcacacagtcaaagaaaatgttacaaaggcctgataagaaggcaagtactcaaagtactctaggatgaggaaacaaattaacctgagcatggttttggtgttggttttgtttgtttgtcttttaagctaaggactagtctcaaaagataatatgcaaacaggtaataagtttaacccatttaccaaaaaaaataaataaataaagtcaaagacctggttccacaggcatagcctagcaacctggatcaatttccagaatccactgactctacaaagtggtcctcttaccccctatatgcatgctataaaaagctcacacatacccatacactgaaactctgtatttctagtatgtttttggttaatgttatggctacagtttgaggagcaagaaagcagaggtccttcctcaaggtggcactgaactcactgtggaacagcctactgtcatctacaggtcatttgaacttattaggtcaaatgtcttttcatcctaaatctgacgccctattcaagatcatttctataatatcctcagcctctgtctagtcttgccatttgcttccagagtttactctctgactgtatcttttcttgtccatactatttatcccacaattctctgggtttgtgaaatgagtgagcacgtgaagctgggtcttctaataaatacttgaacatcacaaactagtaaatactggcattaccttggcctggaagattgagccagctctgaagtcagctgggtgtggtaggtgacaattccaatcaacagatataccctgcatacatgcacgcatatctgaccaactctcagcactccacatataaacatgtgacttagcagattcctgcccacgtcaacacttacagtccctatgcctgggcactggctaattttagtccccccacaatgcccctggctacctgcctaaccccactaccacaatttgaatgatcctctttcactagcatcgactatcatttggcgtctgtagagtgtatcaagatggttgcttttggtcagtgtagttaagagtgtctttgattatggagcaagaaaggtgtgagatcctcattgggggaatgcagagtctttaaagaaagtgtaaatcccagccatagtcacctagccagtgtgtgatcttgataagttacttgattcctcagaacttcattgtccttatttggaaaatgctgccaatcacatctaccctcacagagtataaatgttgcatgaggtgttcatgaagtctccatagaatgcctattacctaacgctggctccatcaaggttaacaacctaaatcagaagcctaaatgaatactatccgatcttatagattgtttcattctaaccaacagcaaagagtgcatatggcctgtgtctcttctttataaagcactgaaccacactgctgaatttccccattaccatcctgctattgtatccaatcaaacaataaatgaatgaatgaatgaacaaacgaacgaacgaacgaatgaataggagagaaattttccaattttccacataaaagaagtaagaagcctgctcagtcttcagtgtatgctaacacaggtcaggtgtgaaatcagcctggcagatgtcactctccgtcacagctccatttctctttcgaagcctccagagtcagtcactgcagagatgcggcagaaccacctagacctgctctgcctttggaagaaagtggtgagcagagccagatggcatgcagtggggaggcagatagatggccatcaggaggatccgttctgtgttactgctcaacacagaggattcaggatgagtctccagggcatcaaggattccttggccaagccttggctggctatggctaatgacattggccaaccaagcactaacacctgactcctagaagaaagttcaaatacacaggttctatgcagggtaggattaatacttgaagccatcaggagccccagcccagttttgctacctgcacagaacctcatatgcagttgctcaggttaatacacaaagggcaagagaggggaagcacttttaaagttctttcatggaaaacgattgcctccatttctttttatgaacaaaatccttaatgagatccacaaaaatgctcactttaagtgaaaataaacccatttgggacttgccctccatccgggtcacttttgagtactcagccacacagccttgtcatgccaaagctgctgtgagaacctaagtgctggtccagataaatggctcttatttggagagtgctgaacactgtccatctaagttcttttagctccctgatacttttctaagccaaaactcatgatccttagcttaacaagcacatatttttatttttgaaaaaagttagatttaaaaataaaatgaatttaaaaattcaattaccttcataatggactgacaccctctctgccaagacacatgcatattcacccaaaagatgaaatgaaattgtcattttaactgtttggaaataagtgacaatttacttatagttggaggaaagcagtcctcccatgttgcttcagtgaaatgtctctctgcaaatgagccgtttcactaggcctgaatatggagcccaagtcttcctggccctcagaactacctgcagactgaacaaaatgagaacagatgggaagaaagtcatgagctttgtggatttagctgcccaaggaaaggaatactttccgtaagcctgtgatggcaaaaggcacacccaggcctgaagagcaaggagaaagcagcaaagatttcaattgcatctagatagggttttttggtctgcaattccagttgctttaatattctgctacacagagagagagggagacagacagacagacagacagacagacagacagacagactcaataattagatagttgtcaaatgaattcaatacatatcaattcttgaaaaataaaagtttcaaatattttagcaaaataatggtaaatttttaagattgtcaagaactacttgtggcttattgtacttgaaaatatagaatataaatattcagtccttagagggaagagaagaatggaagaaaggacaaacatgtcagatgcaaggttgatgattacatggaaggccagaggaaactaaaggccttgcaggagagtaaaaggagtaaaagctacggggatgataaatcagaggacagaagatgcaatacaagacatggtaccaacaccacaacagaacatacattcaagccagctaacagacttactggaggacccaatgttgatcttgacatctatctttgaaccttctagtccaatttcattacagaaatcaaagagaagggagtaccaaagtcacctcacaaacggcttgtgttttacatcatttctatttaaaagagaatatcatacaataaattcaaatatgtgaactctaaggttatacagatcatagtttatttgtgggtattgtattagagggcatgccataaacacacaccagctgtctaaagagacagttagcagcctctaatatgaaaagaatgtgctgaatatgtccacaatgtgctggcaatgcttcccaaagagatcagcaggctggtttgtgtgatgggtgcctattgcctaccacaaccatccttggggttccctttaatgactctagacacctccctttggtgggactgtcacacttagggcacagcaggtcaagggcttcacctcctcttgtcctgaaaatgcctcggagagcctgggctctgagccacgagctcaactactgagatttgacagattagaaaaagggttaatggagttctggggagagttcaaagatatatttagaactatgaagaatgggggagaaagcataagccctagagccagaagctgaggagaaagaagggtgtagggaatctccctctggagaaataaggaagaaaacagccagactgaggggcacttccaacagaaacattctgcattttccagaaacacaatagtcacaactcagcaggtcctctgttaggaagccaatgtgttatactgtcctgttatccaacctccttctaagtctattgcaattttaagtagtgtatgtgttatcaaaataaataacatgagttttcataagctcatccttcagctaaagaagaggcattcacattcccaaaggggtggagcctgacaactttccctgcatacaggaagtaatgcaaaactgactgagtttaattggggaaaaattactgcaaaggccccccctgatattctgtttagtaaacaggaaaataaagcaaaacattcctgaaaattgctgtccctgccctgatcaataatagagacacatggtatcacatgagtacgttataacccccattaaaaaatcttcatggcagagactatgggaagatatgggcaggtacccacctggggtaagttctagagaaagaatagaatgaggacaacacatttgtgaccatgatgctggtctcacctttaggcggtcccttgctaactcctgagttctcttcctcagtgccagagatctctgccatccataaatagggggccaagcaagatgaccccattttcacctgaaactgaaccaatctgtttatcgagaggaagcagaaagtgtggtagaattgtgacatctggaaggtatttgaaaagaataggaaccaggattctgacaccacacaaatataaccttagaagtggtttatatatatagacatatgccacatgaccttgcgtggaaccataacctgagactggatccactgaatcgcatgataaaggctaggaggttccaaaatgaagtcttctaataataaattccaaaaattcaaatcaatttctaacttaaaatctagtgcatgaattgtaagtagcttttaaatctgcaaagtaactaagccaattcaacccatattcttcactgcatggaaggcacatccgagattaggtaatagttaaaaacagatttttgcctttggaacagtggcagattatgatgctaagaatgctgtttagagcccttagcagccccccatagatgaattacagttgagtcccttgggagttttacaataagtccctgttcccatgtacaaataactattttcccaatgggagacagtgcttggcctgatgattgggtcttagtggaaactaagcaccagtcaatggaccgccaagttaccatgtgacctgagacaccttcatgagctaggtattagttactctaccaagcggcaacatgtacaacagcaatctaccataaaaataaaggtgatacacaggtgttctggcccaaggaggcactaaagagacaaataagttacatcaagaaattgcctatgtactggtagttcctttccctgctacaatgccctctgtctccaaggatgtgcctaagtatcatgagatgtgtcctataagtgaatgattggggaagagaagactatagcccaatttacagatggttctgcacattatgcaaataccaccaagaagtgacagcagtgtcacttgtcccttcctgggacaatcatgagaaaggcaatcaatgatgagggcaatcttcacgtggttgtacattttctttgagaagaaaaacagccagatgtatgattgcatactgactcatgggaggtagccaatggcttggctagatggttgaagatttggaaggagcatgtaaaactggtaagaaaggtatttgggaaaggagtgtacagatagatatctcaaaattaataaaagatatgaaggtgtgtcattacatgctcaccaaaatgtgatctcagcagagagctttattaatcaagtagataggatgagctgttctctggatagcaaccaacttctttccttagtcatccctgggctcatgaacaaagtgaccaatagggaaaggatgtggtcatgcacacactcaacaacatagactttaatcaccaaggttggcctggctatggctgaagcttagtgacaatctgccatcagcagacaccaaccctgagctctagatatggcaccaccattcactgggtgaccagccaatgacctggtggcaggttgactgccttgaaccactttgatcagtcacatagaaggcagcactttattttcactggaataggtatttgttctgggtatagacctgtctttcctgcttctgccaaaactactatccatgaacttacagaataccttattcaccaccatggtattccacacaacattgcttctaacaaaagaactcacctcaaagtcaaagaagtttggcaatgggctggtattcatggaattcacttctcttgccatcctgaggaagctaggatggaatggcctttttaaaacagcattgtaatgctaggtggaaatgacctggaatggtaggacacagttctgtagaaggctataaaacatacttggcactattatactacctatgtgagctcctctcttttctcatccaaaaataaaggaataagcagtgcttacaatgtaagtccacttatcaacatgcagcatgcagtaaacatccattagatgctatagtgtgtagtgtatatgctacgggcaattatataaatttcaaaatgctaaaaaaatatgataaaatgagttgctaaatgaagtgctatagtttcccttttcatggatgactcaatgatatgtgttctatattaagcgttttttaataaatatattgaacaccataagtcaaaaatctagcttattctcattgcccttaagaatatcatcagtacccaggccattgaggataggggaaaaccaggagcatatattgctcatgatcttttcaaggcctccaaacatattccattcctacatatagcttccttatagctcttttagcctcccacttattttcataactcttgaaatttttggaagttagagaatccagtagcaagatttatgctttgtcataaggattctctaccatttcctgtgggttaggagccccttattccaatcaaagggggctgttttacttcaagaatgtcttatgattgatgttcacttaatatatttttatttctaaagttaggaatgataaattattggttaaagaatcctcaatgatatgagtcacataggtcaggttttccatttactattattcaacccatctaccatggagtagtgactttactacaggggctctgttggggatgtatgatgacagagaatctgccacacatgggctgcttttagcttcttggttgtttctgcagattagaccagaatagacagctctgtatatataggaatcctgggtaaaggtatcttcaatatcactcctgaactaatagattatttccatctctcaggccaggtccctgtcattttccatgctattgacagagaactacatgtgagaatctgctctggtgaagcacatctgatcacatgcatgactacatgaagaatatttaatactgtggtgaacagcattggcaccagaatcaacgcaaggggaagactgaaccctataaggaaatgtagaacagaaaaagcaaagaaatggccaaatcaagaaagcaaatacagagctatgtatggtttcatgagtatcaattaggccacagagttaaacttcacccaacaatggtgaaaggtggcccaccacataaaaagaaaagtctgaagagaatgtacatcatctccagacctgatgttattacaaagtaccaattacatgtctagtctttgaatggtctccatggataaatccaggcaaaattccttgatatcaaactataaagcagctttcaaagccaatagactggcccctctccattctcctaaaaaagacagccatgtctgaaatatgtaaaaccatcagtctttcagtgagaaaagattattttttgcctaagcaaagcatgtttgatgtacacacctatgtgggttgactaattttatgtcaacttggtacaaactggaataatctcaaagacatatttgaaaaaaaatgcctcaataaaattgggatgtaggcaaacctgtatggactcttcctaagtagattgatgggggaaaggtccagtccattgtgagtagtaccatccctgagctggtggtctggatgctataacaaagcaggctgaacaatccacatgaagcaagccagaaagcagcactcctccatggcttctgcatcaactcctgcctccaggttcctgctttgcctgagttcctgccctgattttctttaatgatggactgtgatttgaaagtgtagcaaaataactaattactttagtcatggtgtttcatcacagcaagaacaactctaactaagataccatgcttaaaaaataattactcaaataaaaccaatccctttgggccctctccatatagagggatattctcttagcctagacatactggggaggatctaggccctgctccaaatgatatgacagactttgaagatctaccatggaaggcctcaccctccctggggaccagaaaggggttgagatagggggtcagtggggggcagggaaggaggggagggaaagggaactgagattgacatgtaaaagaagcttgtttctagtttaaattttaaaaaggaaaacaaacaatccctttacagtaatgaaatcctaatataacaaaatctggaatatccaaccagccagtgggcaaatgccttattgctctttcaggccacatacgatgaatggagggaattcagttcttatctttatagctacagattagtgcatcgattggccctcatcagaaaagcttcttttctcagtagatggcaattgacctagagatctgcaaacagttgaaatatagagaataagaagctggaatgctcagtcctaaatgggccatcataatctttctttccaaggctcagagaccatcatggaagaggggacagaaaaagtttgtgagtcagagatagtgaatgactgcaacaaaatgatgatttctcctatccaagtactaaccaggtccgactctgcttagcttctgagatcagacgagatcaggctccgttggggtggtatggccatagaccaaaatgatgatttctgaatgggagcagaccactgaacacagtaatacacagcagtggtgactacatgcatatggcctatccaaagtcaagtcagacaaaatccaaggataggtaggggatggagtcatgaagttcaatctctgaggggctcttggcaactgccaggagagagaggcagtttccttcggggatgcagcccctagaagaccactcatgctgcagtaaatgaccctacacacattggcaacattaaatgaattcagaaggttcaaaaaaaggtacatgaagttgagagagaataactgtggagagggagaatagggagggattgaggggagaaaagtgaatgggatggggtaggtttgatgatttactgtgttcaaacagtaaaaattaaatttaaaaaatttagaaatacagagcagaaaatgccagaatggaaaatgcatctattctgtcaccttagctgagacaaagccttcagtctgtagacccgtgctgttgcctctcttactgtacactgactggccttctgctcactcatattgcacaaagcttcatgtttccatgcctctgtggccctcctcttgcactcctgtttcaatgtccatttcccttgtcactgcttcttacttccaaattcatatttataataatttcttcctatcttttcccactacccctccctacccaaagtacccatattcccaatctgaattaattcaaaggactcctgaactgcctaccctactcacacatgcactacatctccatggccaatttcatctttctggtgtcatgtcatattctgtttaaactgttctggttactttccattcattctgttcaagagtcaggttccccatgttcccagcttcatccaaaatcttcccagtgttatattctatggctcctttccacatgcctcatcctttctgccaaacaactttttctttacctgctcatcactagtgatgtcatgcatgcctctgttcatgttgtccttcccttcagaatggtttcttgccccaaaacttactgctctaatcatagtccttcagggttcaatctaagttacctcttccatgagacttctctgtggatgcaggagtctcctaacattacacctcaaactgaaccaattgctttcttaaatgatagctatgtgcagagtttatctgttctattagaatgtcaggccccactgacagaaaaacattcttaggtggttcctgtatgtaatctcagatctcagaacacagtgaggcgggaagatcttcagacactatctcacgataaaaagaaggaaaaggaaacagccttggagtacattttagcctccaagttgcatacatactgcctttcacatagtaggctctcaggagaatttcatattgaataaataaaggaattacaaattatgataaaaaatttgcggtacacatcatggcccaacaatgcttaagctagggtcaagttgtcatcagttaagagaaaacatatggcacaactgaggaagaaaagatgttggagtaaataatgaatgcagtcactaatggccatagtgactttgggaaatcaatttagcctcaggcagccttagtatttttatctgggtcacttattttacaaagctgtggtgagaattaggaggggaaattttcctgagccggattttgaaataagtaagtgtccaacaaatgttaggtgctagtggtttcagagacttctttctgaccatttcctctttgttccttaagccagctctagtgtgatggatcctcatgtaagttagagataagacttgcaggtgtccagactccacagtgagaaggtctctttccaccagaaataagccaaatacatttatgggagacctggatcaaagctaagttcagcctgaactagacctgccctaatatacagtagtcagctctatattttgcatttatgtatctttactatctgttaaaaaagatgatttattgatggtgccccttaaaattcatttcgcttttactcttaattatagattatgtaaaaatgcttcatcatatgctgtctacatacttataacatactggtcactaatgatgctgttctctaccttccataaatggactgttagatccttttcagtggcttcttttcctactggtttcagatgttagtcccctaatccttggaaacagaaccacttctcctgtgaattatgcagcaagtagtttcccataaattctttcttctttttataaagggcatctcaatacacagaacaaacagaaattctgggcttctctcagctgagctgtggagggggggtgagaaaggaatacaaccccccacaggagagatcctgctttccctgggccttctattaccccccccaagagtttagaggtaatctccaagggctcatatcaaacatcagttgtctctgacaaaaaaataagaggaaatctatgtccatcctttacaggaagagagcaagcaatagccttgttcaaaagtctcaaataagagaaagggaaaaagtgaatgacttcagagggcaccgtgccttccatcatctcatactatcaccaatgaaaagaaaacacacctagaatcatcagcaccatgtgagcactggacctgtgcaccgtagagatgagcatgcacacacatgtgctcacacacattgctcttgtgtctgcacttcttctctgtctttaacacctgtgttcccccattgttcgtgtcttctcttttatgatacccattatctgagtttggttttgcttgctgcaataaacatcatgaccaaaatcaacttggagaaagaaaggtttatttctgtttaaggttcatagtccatcatgaagagaagtctaggcagaagctcaaggcaggaacttggagacagggactgaattagaggccatggaggtgttctgcttactgacttgttccctgtgtcttactcagcctgcttctttacataacttaggatcacttgcccagggatggcaccacccacaatggtctggatcatatcatatcaatcattaattaagaaaatgcccaacagacttgtccataggtcattttatagaggcaagtctgttgggcattttgtcaattgaaagtccctcttcataaatgactctagcttgtccaatatcagcctcttgactgtctccatgtcaggagtcttagcccatcacctctttggatgtcagtgagttggctccaaccttccctcttggacacattagaaaaacctagcattcttcctcaaaaccccagtcaccgtaggcttctgatggggaatgtactgtgtatgtttatcttattgattgttaaataaaatactgtttggccaatgagacagcaagttagataggactaggagttaaagaggattttgggaaatgtagtagagaagtggtgatccaggcaggaagtgacatagcaaggagactcatatgagcaaggagaaaaaggaaatgtgtccctttttccccttcctcctccagcggcaggatgtgatccaccagcaaggagggacgccaataaggcatccaataagataagtcctataaaatatatagatttataataattaagactgagctaacagatgagaatcctagtcattgaccaagcagctttgaacctaatacaagtttctgtgtattcatttgggcctaacttgggtgggtggctggcataaagcgcacatgtggcaatggggctggcggcttttggtggaaagatttatcatatcaggcttccagttcctgcttctgttcatttcttccattcttccataggttttgccaaacacctccctgatccttaatatcatgcctcattgcaggctcaaagtccaaaagactgtcaaagattcccagcaaaaggaacagaggtaaagaaaaagcacagtgtgtgactgcaaggacacacacacacacacacacacacacacacacacacacaccattccttgctaagaggcaagtaaccatttcttctgtccaggaaactatagtgggtacttatcctacctagtgccaatcttgctactagaagccccttgctccactgtctaccggcatggtcctccctaattccacacacacacacacacagagagacactttccaattcttcatccttgagcacaaatgagtgctctctcagtcttgcctcttacttactctatctgtatactaagacagtgattttcttccttttttgactaatacctatagtagaacctactttaaaattctcaatacacatgcatacacactacatatatgcatgtgaaactacatgcatatgttaaaaagtatgtataaaagaatataatatacatttattgtatagatatttggtgtataaaagtcctatattacactataaatgtgtgtacacatgtatatacatataatatatacatgtttgtatatacagcatatgatatacatatcaatacaaaaggtttggggaggggctgagtttagggtctcactatgtaaccttggctgctctgactcactctgtagaccagcctggcatcaaactcacagagatctacctgcctctgccttctgtgctaatattaaaggcttgtgccaccatgtcagtcttttatttccttttaaaaacattattggtcataatccagaaataatagatttaatgacaagtcaactgcataaagtccatttttccaggatccaaatgtcccctcaagagtttttcctggtgttcatttctactcccatataaagatgaaaaactcatcaggaaatgttgacatttcatctcaatataagtactacatgctaaacataaaaaaggatgtgctttgtgaagaaactagatgggtttagttcacaatttcaagccaattgaacccagtttctctaaactctggatttttctttcaagcttaatgattggaggacagctaattcctaagaatatcttagggtttgaattaaataaggatgtttcctgacagagtagtcctaaacaaattctttttactattattatgcacatatgtaaatgaaatttggagtatctgctgtttgacaccatcatgttaataacctcttacaagcctccaggagtatagtccacttccctctagcaagacagctacactgttcatgttaccaacactaaaatataaaaagccactcaacagattttgtgcttatttccaaaactatcacaacctttcattgcttagtcagaagcagaatgtgacatccaagaaaatttacatctgaaagcccaatccattggacttggaacagatcacactgaaataaacttcttgacatttcacttgctttccgttcttccccaccatctcctagtttttctagcctattgtaaagagacatgaataggataaaatatccatagctgtaccatgacgtattaccagtgtggctggcagatctcacaggtctccaatttgtagccatgcatctcagagatcacaggccaactctagtcaacaatgcagtgatgataaagggcagggcaggactagcctgactcaaccctaacatcccaataaccagataacccagtaacagcccaataacccctgtcactgagcttataaagcataatagcacttggaggagtggctactgtaatggtgatgtccaatactggtcctccatagaactttcaagtactcatataggagtcttcattttcctagcctcaaactctgccatacatacacacatcagaagcaaaaatggttgcattttagttctataaactatgacttgatagccccaagaaccaataagaatgctgataaatttctaagtatttctttcttctccctcttcccctctcctaccctcttcatctctctagcccttaccctctccttcactttatttgttctggttttaaagtgccttagagacattgccattattaaccatctcctatcaaagaaatttcatctcattagatgaaatacctaatggcaggatgtgctctgtgttgaaaccagaactttcactctgccactaatgcacatgccagccagcatgtgcacacactaccatctcttgactccgtagttcccacacctattacagtgactggcacacattaccttgtcagcaaatgttaaggaggttgaattgacttgacttgcacaagccatttaatgcaactagagcaagctaggtatttaaattcagtgccttaattccccacattgaattgaatttcccatattaaattttactaaaactttaaatcaaaagcaagtatatacatcatcctaaattttctgatactaatgcatccctgagccacctagctctcgctgacttctctgcacagaatcagaatctgtggtattcaaacgtggtttttgaaagatctactattatctcatgaccatactaaatctgcatttattaaaaggacatcacttaagggcaattctagccttggtcaagcttttagaaggatacaacagtgagcttatggttaaaacctttttggagagcatgaacacatgataaccagttgtgatacttttccacatttttataataactaaaaatatgttcagatatccagaactgatcccacaagttgatttattcacaagtcccccaaagttcttaataagtacaatatggtacaatgaaaatcatgcttattactgctattgggttggtaattctccaagatgaaatcatacttttcaggttataaatatacattttattgttgattttatgttgcattttgaaatactgcttctctgctttcatattttcagggccttacaagggcaccataaatcagctgcaaactggaggaatgctaattgatatcaggtgatttcaaaaatgaaggatccattaagcatgctgtgtgtttcatgggttttggttagtatggagtactttcaaaaccaagatatgccaagaatttatcttccaagattaattacataaatgtttacatgctagatattttagagggcttacagaaggcattgtgcaacccagatccaatgccaaaacatataaaagatacaaggatgtatcatatccgacacatcaccaggagatctagtgttttcttagtaaaacaaggaagttatattcagcataatttgacctgaatagtttttctaacttttctgatcctttttttctctctctctttcttgatccaatctacagcattgttgtttggaatttcaggtgtagatcaacagataacattaaaaaaccaagttcactatttttcaaaagtcttagtgaaaaaccaaccaggtacttcaggttgttttgggcaactagcaacagtgtaaatactggtgtttttacccatggctccagtgacaacctgcataaaagaaaaaaattaaactttattgaaatggtaactagcagttgggaagggtgaatgacagaaagggtgggaaaagggggttgagttagaataatgcctgctataatcatatttaaaaattacacagcaagtcccactaatgtgtgcaatcaatgtgctaataaaaattgtaatactaaatatttgaatagttataaattcatctctccaaaaatattacaggaacagttcataaaattatgtttatagaagaatttttaaaatgcagtagttgggaatttccttctgttcatatgtgtgtagatggtttactagtgtgtgtgtgagcacacacatgcatcagccagtcaggaaactcttaatgctgtttagtaagagtattttaaaaggtaacaaaagaatttgaaatgaattactgtgaagcccatattttgcccaaaggagaaatctgtaaagtgttatgacatatgaatggttgtattttgctacacaactactagaacatatttaaggaaaatcctatgattgaatcaacactagcactgagaatccaacccctgcctttaaaaatgtaaaaaccagagactagaaatgtaagactaaccaaaaattgtaagttgtgtttgcaccaaatccaggacaatgaatgaagttcccttcttctagggagaaaaactccaagttctccatccacctgatgggaatgaggcccatccatggtccccttgccaccttttccttccccaaagtgactaaccaactttgaactaaaactcttctgatcagttcactaaccacacacaacacatctctatctccttaactgaagatctttccaaagacagagactttccccctcttatttggccgtttttttaatttattgattttataggtgtcatgcctgcatgtatgtctgtacaacttgtgtgtgcctgctgcctgaggaggcaagaagatggtgttgtttctcctgggactgaaattacagacaattgtgagccaccacgtgggtactgggaatcaaacctgggtcccctggaagaacagcaagtactctgaaccaccttgccgtgtcttcagccctcttttttgtttgtttgtctgtttttaaaactgacttccgccgattttattttttctccattttttatttaaattagaaacaagattattttacatgtcgatcccagttccctctccctctcctcctcccctgaccccccactgacaccctacctatcccatacaatttcagctccctagggagagtgaggccatccatggggaagtcttcagagtctgtcatatcctttgagatagggtctaggccctcccccttgtgtctaggctaagggagtatccctgtatgtgaaatgggctcccaaagtccattcctatactagggataagtattgatctacaacaagaggccccatagatttccaaggcctcctcactgacacccacattcatggggtctggatcagttctatgctggtttcccagtgatcagtctgggagccaagagctcccccttgttcaggtcagctgtttctgtggttttcaccagcctggtctggacctctttgctcatcactcctccttctctgcaactagattccagttcagtccagtgtttagctgtggttatctgcttctacttccatctgctgctggatgaaggctctaggatggcatataagttagttatcaatctcattatcaggggaaggcatttaaggtagcctctccactgttgcttagatggttagttggtgtcattcttgtagatatctggatatttccctagtgcctgatttctctttaaacttatattggctccctctctatatcatgcatatgctagttttatattaaaagatgccaccatctctgctccatgctatgtaaaaaaggcagaaatcccagaactgatattcacggtgtattggtcagaacagaagtaacagctatgataattaacactaaatctcagtttctgggccattgttcattgacatcacagtctaatgagatgctagagaagctctctgctctatgcagtcattcagaaaactaggattttttcatccaagggctgaaccaactactagaagtttgacatcactcagatgacagctgaatgaggaagcacagagaattgggattcactgggaaggtttcagtaccagggatgaagcataccagatggacctacctaactgtagggaaacctgggggacatatagatttttttctatgtgctgtgcaagtaaaaacatagattctttggtgtacatagctgcttcaataattaagtcttgatttcgggagacttacttgtaaaaatcatatcatacatagtctatgcaagttagctttaactagttcttctcattctgaattttaatacttctttgtctttaagcttcatcataccatttgtgaaaagaaatcaaatgaatgtgtatgcatgtgatcaagagcctttatttttaaaaaaggacaaattctaaacctgtatcttttttaaagatagactatatttattttattttttttcatgtgtataggtgttttcccctgcatgtgtatatgtttaccatgtgcagttacctgatacctgtgggggccagaagagggcatcaagtcccctggaactgtaattagagatggtgtgagccaccaaacagatgtggggaaccaaagtcaagtcctttgcaaacgcaacaagtacattccctaagagccctctatacccctatacctgtatctttatgctaactgtatttcttcctgtattttcttatctcttttttctgtaggtcatttgtccattccttatctcttcccttagtctaaatcccttatctcaagtatactctatctataacacctttcataaagagatgttgactttatctctacctacaatgcttcattagagaagttgtcttgcccatgacatcacaggagtaccctagaaagaggaacactcccacatcagctacaactgatgcaagaaggaaagatgatctctgccaagcaaagaaaagttggcattctagaaatctgtagttgaggctactatctacagttatcggtatggagacagtctataaaggtcaagttacctgcttgctactctactattgttatgtcaagtataatgcaaagttataagagaggatggctgagaatatgttggtagaatgcttgttgtgcaatcatgttgacttgatttggattctcagcacccatattaaaaaaaaaaaaaaagctacaaggatggacatacacctgtaatcccagaactaaagaagtagagatgggattatactttgggctttctagtcaaccagtctagataaattggtgaactctggattcattgagaaactttctccaaaaaatgaggtaataagcaatagtggagatatccatcatcaatctctggcctccatgtgtgcatgtgtatgcatgcatgagaacacatgcacgtgcacactcatagaaatggaccaaacatgaaaatccaggcttgggctaagaaccctagaaagggggcaacaaagtctgtaagtgtggagtccacagtcagctgtgtctttaactgtcaacaaaacagcatggctttggaaataaactctttccatggatgttccttcctgctcatcttcatgtttctccaaacttttgttcttccaaagagaaggaaaatagatcaccagagggtaggaatggtagccattgcaaggcttactataaaaaggagtttggaaagaatgaaggtcctggagaatcaagactgaagttagccatgctcgtgcaaatgaatggtgctcagtgagtcagaacacaaccaaagatagccatgttggtcagagttagagagctatggggtgcctaaaaataatcttaatgcatacaacacaggactcaaaggatgcaactgtcccaaggtgcattgacttccagatgtggactcaatatgttcctcttttccacactactctctccctacacatctgcccactgccttctagtctatatgtaccttcttcacgtttgtatctgtgaataaagagacccaaagaggctaacatgttcagccatgcttatacaagtcattgctgatggacagcatggttaggcccctagtttctagctacagtgttttcgatccactgagattcatggacgtcattttgagctaaaggtggagaaaactaagccattcctgctgtatgtcttccccaatagcaccccacaaatcatgataagaaaatgaaaatgcaaccttttgtcaaaagaaacaaacttattgtctgtgttgagactgaaaatgcaaattcaagatattgatagggtgggcaggagacagtcccttttcaggactgcaaggaataaaacttgttccaaatgtctcttggctacacgataaccatatttgtagcctgtttgtcttcacattctcttctccttgcttctctctcaaaatccaaatttcccttttgataaaaacagaaataattcatgagggactcaccctaccagggtaacctcatcttgactcatcacatctatatctgcctgctcattaataagatcacaagcagagatacacaggagcatgacttcgtcatataaattaggagaggacaccctatagcctgttgtacctggaaagtgagagacttcttcaggtgaggtgactgatggccaacttgaagcagcaaagatacaggcagaaatagaactgccatggcagggacagcactcactggaggaaacagtggaataagcagaatgatgaggctgaccaggtcaggcttgtgtagacagaccttcgggtatctccccccagaaaacccgtggtagatatctaaggatgatggatgcagaatgtgatctcagcctttctgataactcacctaccttgttacttcaactgataaaactaattgctcgaatctgcctctgtttaaaaggcattcagatgcagccatcaacactatctaagagagatcaaataagaacatcttcctcagaggaggaggaaaggggagttggtacagaagtagagaaatcgctcttccatcccatgtcgcatccttttctcaacctctgattctagatcctgccaacaccttagcacaccaggaccaacattttgtgcagccctcttttgtgcttctaccctgataccttcagtcagcatgagtgattaaaaccaatagaggaattttccagcttccatggttgggatggatgaagataaaaaggatttccctaaaatcaaccccactattgttatttcagagtactcaataattcctcttagttgtgtttgtggagtagagggaccccaagtgaataaactcctgagtgcaagtgtgctgttgctataggtacactcctgagtgcaagtgtgctgttgctttaggtacaaacacatcaaggaccctagcctcggacctatgggaaaatggcaaagcctccttactagtctgaggctcagagggatagaaaagccttctgctggtctatgtgaggatgctgatatgtgctcaaaaatgcccaccatatattatttatgatttattaaaacttaactgaggattcaggaaagcaaagccagcttcaggctgtagagatcaggcagtgatgatacacacctttaatctcagcaaccagaagctaggagttgatggtacacacctttaatcttaggactcaggattaagaggtagacagatctctgtgagtccgaggccacccagacctatacaagagtgaatcagtctaaaagagaattatatgtcacacctttaatcccagcactataggagtataaaagattggagcaagtagtcagtatgatgcatccattctccagccaccaggaggagaggttacagtctgaggcttggtgagagcttgtagagacaggatcagtgcattaagactgaggtagaagctagtggccaactgctttgcttttctgaacttcagcttgaagtttgaaccccaatatcaatctctggatcttttatttttcatgttacacacactagttttctcaacccaacccccaacaattactgcctgaacaatgtttcactacagagactgctactatcaagatttgctaaatacgtccccctgaatcaaatgtataccgtaacccttgtttatctgcatgtgaaaccccagcctcttcttctgctgtatgcagaacctacccattctgttcaactccatataacaaacatgccgagctcctgaaatgctatgctttcttcacaagggaacccagaccatctgagcccagctttctattccctgtgtcacctgtcttctcttcattcctccctactcctggacaggtcaagtccctgagtctgtgcaaggatatggcaattctgtcttgtacttccatcttccttcttccatggtcacctctcccacagtcatggctcttggaaccacccttagtacacactgcctgcacccaggtccttgcctcaggctttgctcttaagaaaatcaaaaccagatattctcatcctatgggtctcaacccttttgggggacaaatgactcttccacaggagtcatatatcagacatcctatatatcagatatttacattacaattcataacagtagcaaaattacagttatgaagtagcatcgaaaataattttatggttggggtcactagcacttgaggaactgtattaaagtttacagcattaggaaggttgagaaccactggcctaaaccaaaacagtaaaactgaaactggaactgtaggagtctaagcacttaaaggtcaccttctatgactgtggcctcattcaagtcctcaagcaactgattttagagaatggtttagggatctctgtgcaagacattgtttaagtgttgagaatagaacatagaggatgacatgacctgtgcccccaggaagtttcaaatcccctggaaaggaacaaaatgctttggagtaatcactaactcaatgaaacaccgaggcccatatttccttgatatttttgatccgcaaggccccaataattgccaaaaacaatccgcctcttctcctgccccagagcatcccattcactttatgacccaggttcccatggctccaatttatgtgcaatccacaaaacatctgtttaattttaaagtttatatggcagctcttctaaatcccagagtctttttcaaccttctcttcctctccgccactccaagaagatggagaaaattcatttcctgtgtaaaatgtaagatgacagaagggcctcaggttaaaactatttacaaaaagtaataataacgataataaaataaaacattgccagtgtttagaaaaagcagtttcatttgaaaagtccacttatctacctgactttgagtgtctcatggtactctatgatgagggggtttgacttacaagcaacagtggggaaaaagtaattctctttgtttctccccagtatgagtggtcgcctaacgaaatgatcgatttgttttgctaaatgacaccttaggaagagtcttccttccctgctccaatgttctctgagaatctcataccctacggcctccatctggcccctcactctctgctttcttatttttatgctaatggcacggacaggtctttggaaggtctttgtcagggaagttgagcttgactccccaaaatgcatgcacctacagatacttctgtggagggatcacagaagcaggtgctgctaaaatcattttcctgggggagatgtaagcgttaaccctctcgtccaaagtcccaaagataaccctgtattgtgacagcttgtttatgttctgacaaataaagcttgctgggattcagagggtggagctagccactagttaaccatagaggtttggaagactgtagacagagagacaggaagtagtaagacaggcagagagaggatcttgcccctttatggactgaggaaggagagactaaggaagcaactgatggctgctcctggctctctgatcttccagattttcatccccatatctgactcctgatttttttattagttaagattaattagattgatacttcataaaccatctcagtttaccctagagagccaatgagtttattaggcttatttataaaacaataggtgcccaggggtgaggggagtacaggcaggagtttgggtattctgaaagccaccacactagaaagactgcacccatcatacatgatcccccaaaagcacatagatcagtcctaatttcctattttcctaatttcctaattgatcctaatagatcaacctaatttcctatacactacccatcccatatatttacagcccctccctgaggccatatcccattagggcagaattacaaacaattgttttagaggaatggctgaagtcctaggtgagggccccataaccctccctaccccttctatgaaagaagaacaatagtcaacaagaacagctgtagtgtaagtgttcacaggtgaactcatggagatggtggcagtttgccttcatccttacaacactaaacaccatccctttggcacttgtattctttttgtccctccccccttctactagggtccatgagatttaggagagataccatagatgtctgactattcttcaactccaggcatgaaacccaatcctggaacatggctagtggcaactgcctgaggcaccccctctattacaaactataagaagaaatgggtgggaaacaagaagcagaaaactatccaaagggacactgactgaaataataacctctaattatagacacaacagtggagaagcactttcactggtacatcattgaacaactcaataacaattgcttttccattagagcccatgatttccctggtgacgagtttgaatctgaattcccagtaccagaggtaaatgttcccctatggagaggtacataagtccaatcagaaagttggttctatccataattacttaggccacacttgtaccagctagtaagtacatcttgcagcatgcaggatccacagctgattaagactttgggtcttaattctctgcagcaactgcatcagcttctgtaacactcagtctggctccatctgccccatatcccatggcctcacaaaccaggccatgagagatgcttcattgctcatttaaggctttcccctgagtccagtgatgaaacttcccccaattactatggtctctgtgatcagaccactgttaagaactctgccttaatgctatatcatggatttttcctttctctatatctgagatactccaaagtgtcttctgttgcctctatttcactttcttcctcttcactacctaactttccctgtgggttccagatttgagatcccagaaagggctcatcaatagggatatgatttgtgttttctttaccctatgacctacataacatctcactctgggaacccacctcattatcagaccctccccagttctccttctgtgagaccaacagtcatcaagtccagctgtggtggtcttctgtaagcagactcggctgaactcatgaagattgtggcagttggatttggaaggtggagtcctgggtagcaatcgatgagtcaacatcacagttgaataacaactgaaatcatttcccttcctccaagataccacaaaaatagcaaccctattctttcctgttcttataaccccccaaaccccttcccatttagaacttggttggtatttagggatggcctctcagtgcacataagcattctactgtcccagcttcatcactgggtttcaggaaccatcgtgtaccctcagagcacatgcctatctacacccagttcacataaaggttgtagtaagtgttgaattgtgcctccaaaagatcagatattgaaacaaactctcaatgactctcaatatgatctttattggaaatcggtttgttgtcgatatgtcgtaaggtgaggtcattaatagcataccactgtattctgaggggcatctgggcacaatgatacacacagaagagaggcatgtaaagatgatgtatttacaagccaagaccaatgattgccatcaaactcccagaggccagactggaggcacagaatgggttctctcttacaacccacagaagataactctgccaggaccaggatcttacacgtttagactccaaaattgtgaaactccaaaattgtgaaacaataaatctgtgttgtttagccacctggtttgtagtatttagttatggctgccctcacaaactagattctactgttatcccaaacaagcaatgcctccagactatatggatgaattgggaagggccaaagggatgaaaggaattaaagaaaacagcaatagtagccacctactaccactgtccataatgtaagaaggatccacacaaaacaagaccatttggaatttggtcaaaaaaatgttagcacttcacagtgctgtcagcatctttcaatcttcacaaaatgacttctgctgttttaatgcccaagaaaatattttccaaagtataagtgaagttttctttgtggaaaagatgtgggcctgtacagtttctgtgttatatacgctgactaagtgagaccttgagaaactgagaactccagctcctatgtttcttcgttgcaaaatgaattgtatctcctctcagggttatccagagaagagataaaacaagatatgcacataattcctagtgttctcttctcatgggctttatgtttggcacacaattccctgtgatagggaaaatgctgaaccccatttctgaaggtaaaaagttctgatgtgcctatcatcttataatttaaagaacaatttgctggaaaaaaagaaatctgaaattctctgatttcttgaaaatatgagtgactggttcaaatgaagtatcaatatgttccaaggggaaaccacttggccatttaacatagactaggaaataaaattcacaggatcaatgtcatttaaatattattctcaatcagacaagaaaatcatttattgttaacatgtatttctgaatttcctttactcaaaaaagcaaagggttgtgggtcatcaattaaataaacatggcattttttaactactggatggggcttttggtactcaagagagttgctactatcaatcctactgccctcaagttggtcattgcaaaccttctcccttctgctagcaatgcatgctcatggagtagctcctgggtggtgcctcaaagcacagggtggcttaaggattaacctggatagcccaaccattgcatatgcatgtgtatacacatgtacttgtagtttttacatgatcatatctgtctacaaatacatatatgcatacactcacacacatggagtaatcaaattattctgcagcttcttttcttaagacattcatgaacatttaatgatactagcacacaaagatcattacatgacctcactggttttttaacaactatttgatattctcttttgtggattcgtgctcacttatttaaccagctctatcttgttttattttaccaatttactttgtggtggggaggggttgtatgtgttccatggtgcacatagggaaatcagagggcaacttgagagaatccattctctccctctactgtgtccagggatcaaattcatgttgtcatgaatttgaggcaagtgcctttacccactgagctctctttctggcccttaataaattccattttaataagtttaggttgcttctaatatttttctctaacaaaaaatcacatacatgttttatacatgtacaaacatatccaatggttgtagtagaagcgctgggttcaaagaacagtgtgctctacacttcagtacataatgtcacattgccctctagaaagttgttgctgatgtacaacacaaccaggaaaatatgaaaagacctactaaggaaatatgggatgactatggttaatacagatgcccaagtcccatgccctttgaaattctgaggcagtacatctaagggtctaagctagtgccccaggaatgtgtattttttatacatgccccaagggagccagaataatcaatcagaattaaaaagccctggtggtaaaccatacgccatggcagaaggtacccattagctgcatatcagatattcatcttcctgagaattgcttacacatgtggctttgacctgtgtacaagaaagtagcatttgaaaaccagctcttccctggggagataagctttgtctgctcatcctatttcttacatagagctgtgaaatgacccagctcgtgttgccaggcttggatctaaaatattttttcaatgtttcctgacattttattttaggaatgctgaaaaagataacacatgcctgctgtaataggggaattaaggacatgaatcacagaaactttggcactttgaaaagtttcataaatggaggagggtgtagccagtaaatgatgagaactgaagatgtcggctgccatatgcaccatcctgctatggttagacattttatgccacactaaacccctcatccagatgaagaaaatatctgccctcaaaatttcccagctaaccctagcaaggtacatctaagatacatctctgtgtcgatctgcaagataaacaataaacatccttgagttcaaagatctgatcaatcctccataaacctgtaaagcttaccccagcagtgtttaacctggattcacaggagggccgctttagcatgcctcagcagctaacatatagaaaaggatctatatgatctaggtgaaatactggcattggatgcattcagtggctgtgggattgagtgcacacccagatcaaaaatcactttatataccatagttgatgggaaaggcctggcaggcctcccatccctccctttaatactctagtataaatgaggctacttgtgagagaggagcttggaaataaatttcaataaaactgaaaaagaggaagtgtccttcaaacctctctcttccttcctctcagttctccagttccaaagccgacctccatgctgcccagtgccatacgcagagaagagtgtttgagggaaagtgactgagataaaaagcgacaggaaactcacaacacctccaagtaagaaagcaggatacaggaaggagacagacacacacacagtaatgtgacaagctccaggccactggccagcgctttgtcctgacttggcactgatgtagttattcaatcccaatggctctaaatgggctagtttttctaaagatgacaaaaccagtattatgcttgaaacactacaatttttaaagcttgcagaccaagacttttacttttgtctttggttttgccgtaactctaagttttccagaaacccatatatgggtcaaatgaaggccagaaactactacattacaactcatgatgtgaagtaaccatgtttcaaatctgagaacattgattttaagagtgaatatagtaaaaataataaaaaatgcagctagaaccccaatggcaacagtttgggtagcatattgaagtgcagacttgctatctttaccaagcgccatccattaaactataggtaaatagttcaggcttgcatttaagagttaacccagatggactgtgtggagctgcttcaagagccatctttcctggaaatcatttccctttcatttcctccccataaaagtccaggtgcaccttacactctgctacatgtcaaagaggcccctcccaatgctattctttcctttggtcaccatctgtgccccaaaccctgcattgagcaggcatgcacttgtcaacaccagcaagacagaagcattgccataataaatgcctagtgctctgctgattccctttccctaagcttagattgatgggttttgttctctggagagaatgtaattgagagagaccagagccaataaatacaaaaggcttaggaaaaaatagatatggcatcaattaagtaataaggaaaatgaaaatattagataaaattaacccccataggatgcattgttggcaaaggttttctcccatgctgtaagcagtcttttgtcaattaagaaatcaaaagattaaatagcacagatataaagaaactttaaaaggagaaaaaaataacttaagggattataattattacctattagagaaggtttcagaaatatatctcatgacaaacaagggggaagaaacaactcatgcttctatttctatttcttactttgtgaacaaagtacaatatcccattctgtgtcctagccctggactgttggtctcccaagggtgagtatctcattataaaaatctctgtaaaattaacttaatattttctgactttgaagcaataaaaggaataacaatggtctgcttggtaaacataagattggagtagatgtccctacagggagtgtcctggtcacttggccaataggaaagaatcatgccccagagcctggccaaggaagagagagaagttaaactacatttccacactcccacctcccactggccccagactgacagcaatactatgagtcatggaatgaagacttaattcttatgtttctccacctttctacaacacagctactgtagctactttaagacctaaaaattggccaccatctcattttcttcactgcagtacctacatggttgatctggaatgaaatcaatgtggttgctgagttatacctccccatgcttagtggagattcacagtaggagagaatgcttcaaaactgtccccttctccaaactcggaaaagctatcttcatctatgttaggaaggataggaatctacttaaagggcggggggggggggacccaagatctaggtgttcagcagccatcatggctatggagaagtattaagcagggcacagtgtcacagggatgctgcagtgaggaggaagctgctcagtctgtcagtcagtgtcacctccttggtgtctagagatagacttaacaaagatataatggatgttccattaacagtagagtctaatgaacatactttctaatatgtcacaacagaaactggccagaaggagaatcaatttattgtgagttataatcagaagaggcaactcaaagtacagagcagtactaatttgtccaagtgatgagatacgtcctgtcagtaaatgttataaagtgatttgaaatgtaagagactgatgttgcaggagcaccaggctaaggcagtctctaaaagtggaaagggatttgtcttatcatgatggaaaatcagacactggctctagcttattctgaaaggcatttgctttcgatgcatgtgaacagatacactcacaaacacaaatagtacagaattactgcactttaacggccaggaggaaaaaggaaaaaatcactgctctcactgaaggagcaccaggtgattttgccattccattctttgaattttaagcaaatgaaagaaggaaagcaactaagccatgatccttaatagcacagccatgctgagagaagacatcagaaagaaaacaagatagaatggaaaagcagggtgtactttctacacagattcttcagcctttagaaagaagctgtggtcattatgagctagcccatgagttccacacctcctactgctcactgactgcctccttgttgcctcttctcatttgttttctgttgctgtggcaaacaccattaccaaaagcaacttgggaagaaaacggtttatttcatcttacactttcagatcacactacatcgttaaggtaagtcagggtgggaacctaagcaggaggaatgctgcttgttggcgctctctctctctctctctctctctctctctctctctctctctctctctcatgctcagctagcctatagcccaggcccacctacatagggatggtgaataattttacagtatgggttaggttctactgtgggttcaaacacaattagccccttctcaaccagcaatgtgtagaataacaccatcacaaaggtgagggggggggtagctcaccagagcccaggctatgtggctccacacaagttcagctctggagcttgacaacctaaatatgtcataccttacaaggcaaacaatgtccataaagagtcagagagttttgctctcaagaatagaaggcggataatgagctttgggaaagggagggacggacgggaatgggccaattaatacatacagagaagcagccggctctgctgggctagtttcagtagagttactacaggtaacagttatctaccatatatatcaaaaaagaagaaggtattttgaatgttctcatggtgtaaaaggatgatttagagtagagagtgtttaacctaatttaaacattacataatgtatatatgaatcaaaatatcacatggtaacccattatgtccaatttctgtgttcatatatataagtcctaaatcattaaaaaaatatatagcttaatataattacagaaagctctctaactacctgacctcagactgaaggaggccatttaaaatttggaagaagaaggggccagggttatgtctcagtgagcaaagggcttgtagcacaagaatgtagacctgattcggatacccagcatccatgtgggaaagctgagcacagcaccatgtacctgaaaactgtgagagctacaataacaatttgcctcacaaaatatgctcatgggagcaagagtgatgtaaaaaaccatctgctttttgattggatgtaaggcccactcctcaggaggaaggtgcctggtactatgaatctgacctggtcaaaactccaaggctcacaggccctagaggggaagctactactactattttgctaaatggacacagtttgaacctgcttctaattacatatctccgtgctcacagattagtgcagcactgagttctgaccaaacaatcatctttgtgcagtggacattagttaatactgagatccacaaataaagttcagagaacaaattctgtgaagtgctcagccacaaagatgggacatgtatatcaaatctcagagaatatagagggagaaggggacgagaggttataagaaccagaggaagaggaggattgctgagaaacagtgtcttccggacatgacaacaccacttcgtgctcgaactgacaacagctaaggacagctaaggttgcctgtacaagacctccacaacatcaagccatccaacattccagcatgccagagtggtacatgaaaactccacccctagctgaggagttactgatagctaacagctgctaggaaaaggagggtcggttttctttaggggtgtggaccctgggaagctggtcttgttccaatggatggacccacactcaggtatgtatgggcagtactaactgaactccagggggttattttttaaaaaatgaatgtgaaaccaggagggaaatggagtatccaggaagagttggaaggagtacgaatataatgaaagtactttggatgctgtatgcgtgcaaaataaatttaaagacataaaaaaaagaaaagaaaatattcaaatgaaattaagtgctaacttattgggaaatatattagttataatatatagaaatatattaaaccatatgataatggtttaatatctattctagctttaaatttctcaaacaatcaataggaaaaatactactatgtaaacaaaaaatggctggacagtggtggtgcatgcctttaataccagcactccagaggcagaggtagatggatctctttgagttcgaggtcaatttggtctacagagtgagtctcagaaaaaaaaaaaaaacagaaaactggaaaggaggacagaaaacctatgatactataaattgacattaaatatatgaaaaaatggaaaacatatttactagtaatttttcaaaaacaaattaaaattcctatcagttcaaagcatattttagaggtgctatttaatagcagtaggaaggagtgtaaaaaaaaaaaaagcaagttttctcgtatattactatcagaaatttaacttggaaagctattaggcaataggcataaaagtcataaaaatgctcatacttctaaatcaataataccacgtctagaaatctagcctaagtaaatgagcaatgtaataaaagatttatgtacaaaaacacttatcactcagttaagatatgccacagggaaaagatttggtaagttatagtgtggtcctgtaactgaatattaggcagaagtttaaagtaatattgttgaatatttaataacaaaggtaaatgtttatgataaaatattaatgttaaaaacacatggtacaaattatgtgcagtaatgactccaattttataatatatgtatgtatcaaattttgttacatgtgcacatatattctataagtgagtctaaaggactggaaagaactatataagaattaacagctggtaaacccaagtaaagggactactggtgaactctattttccttttacatttctaagttttccaagtgtctttaaagtgagtatgaattactttctagggaaaaatatttaaaaagataaagtagcaattatgattcccataaaatatatatgtattaaacacatacataacctatctaattttatgaaaaattaggcactggatagattatgtgtgcttctgcttggtgatccttcataaaagacagaatacatgacaaacaagtttacaaacggagatataatcaaactaagaggtttccatgtacaaatactatagccaaatgtttcatcatgccttctcatttgtgaaggtattttgacatccatgttcacagacctctgcttgcagaagcatgtcacccttgacatgccctttgtccaaaaaagcatggaacacaggaaagtaaaagtagctatcattgtagcatccccctctctttccccacctgggccctaggacctttgcttcttgttaggaggcagcagcgctcagtgtcccatgccctcatggagcctgtagtttgtgtggcatggctatggtggaacgtctttctcattcactgtgtcacagagaatttcagcatcttcccttagcaaccctggtgcttccaaaccaagacttgctgaaggctagctttcaccctgcaccagaatattgaaactgcatgtggtgaccacaggatgaaatcatgactttgcctttcaatattttgctatactaaaatgtacatgtcataaaatttaccatcgtaactacattaactgtacaatttggcctaaccgccctcatcaccatcacactttttcatcttgtaaagtaaaatggcacctatcaaataataactctcattccccttgctctcagaatggttcagcccctagaaaccaccattcccttccctctcagcccctagaaaccaccattctactttctgtttctatggatctttcctctgtagacatctcacagagcaaaatagtgtggcagttgctatattgtaactggcttgcattatgtcttcaccatcgactcatttcccagcatcagaacttccctccttttaaattttatgtatgtattttatgtgatgtgtgtgtgtgtgtgtgtgtgtgtgtgtgtgtgtgtgtgtgtgtgtgtgtgtgtgtgtgttacatgtgttcaggagcctgtggaattaagaagaggatactgagccaggtggtggtggtgcacgcctttaatcccagcactcgggagggagaggcaggcggatctatgtgagttcgaaaccagcctggtctataagagctagttccagggcagcctccaaagccagagaaaccctgtctcggggaaaaaaaaaaaaaaaaaaaagaggatactgaattccctgaactggagctatgggtggttgtgagccacccgatgggtgctgggatccaaacgcggtccttggcaagacctttaagtattttttattgctgatccatctctccaactctatttttctcctttttaaaggataaataaaactgagggtttttaggaactattcttctattcttttcttggagttttacatttttaatctgccatcccatagtgcaaagggttccaattttccacattgtcagcaattgctgttttttggagtgggagtgatagtcactgtttatcttttgacaatagccaaactattgtgtgtatgaatctcattgcaattctgacttgcatttccctgaaggttaggggaagtgatcatcttttcatgtactcctaggtcactttttatggcttagagaagtgtctactagagtatctctcccatgttttaaccagttttctgtttgacttgacatcttcatggctctgtgtataatctggctattaatattagacacaattttcagacaatatctgccagtctgttgggttgcctttgctctgtccataaagtagagcatccctattccaacatctgaaagccaaactgtcctcaaattctttgagcatcaccgtaacattcattttggatttgagattttcagattgaagtctatgtaatatctattctaaaatccaaacacctatgaaatatgaaaccattcctaagcatttcaaacaagggatacttgatctgtgctatctttttgatgcactttaaaaattttttccatgtagtccaatttgtctggtttttaattctgatgactttggtgacatagtcaggaaaccattaccagatctaatgtcaccaagttttttatgtacctttttcctaaaatttctagtttggggtttctcctttcgatctttggaccacctggacccacctttgtgaagagcactgcaataatccagcctccttatctaatgtgtggctacttaagcttctagccagcctccttgtttgacacatggacacccagatctccaggaccatctgtggaatagaaccactgctttttcactcttttagaagtagaggaaaatttttcaagaaattaccatacattatacttatatgcattttatgtctttagggaaaatttttagctccctccagaatttttgaggcatcaatatgcattaacccaattattaaaccacaaaaaatatttacatctgatcatgatatgctctgaaaaccactatcagaatggctagagtgaatgaataaagaaataatgattgccattttccaaccactgctgttacaaactaccttgagacttatgtattcatactatcctcttaaataatgataatatactagactttttccctacttatattcaacacgaaaattattaaatcctaacaccatcacaattctgccaaatgactgtaagatctaagcacaggctactatagccattgtccttaacctggctcctcagaagacacatcaagccagctttatggtctgtcaactgacttagcccccccccaccccaaccagaggctttttttcaagacagggtttctttgtgtaacagccctgactgtcctggaactcactctgtagaccaggctggtcttgaactcacagagatctgcctgcctctgcctccagagcgctaggattaaaggcatgtgccatcatacaccgctggtggctttttttttttttttttttttttttgagacaggaatcccagctgagaaaccaaagtcagactaagtccaaagtgaaattctacagcgagcacctagagaaggaaactcttgtccatctaggaagagcctatgaaacttcatggccaatagtcctttccactgacctacagggaagatcacacaggctctgacaccccaacacctgccattagaacaaacatggataagagatactataatagagggagacattataggtgtaaagagaaatcaggcactggggaaatactacaaagatgacaccaactaacaatctaagcaacagaggagaggctaccttaaatgccctccccctgataatgagattgatgactaacttatatgccatcctatagccttcatccagcagctggtagaagtagaagcagatacccacagctaaaccttgaactgaactgaaatccagttgcagagaaggatgactgatgagcaaaggggtccataccaggctggtaaaacacacagaagcagctgacctgaacaagggagagcccttggttcccagtctgatagctgggaaaccagcatgggactgatccagacctcctaaatgtgggtgtcagtgaggagacctctgaaatctatggggccccttgtagtggatcagtacttatccctagcataggaatggactttgggagcccattccacatggagggatactccctgagcgtagacacaagggggtaggcctaggccctatcccaaagaatatgacagactctaaagaccccctacggaaggcctcgccctcctgggggagcagaaagggtataggataggtagggtgttagttggcgggggcaggggaggaggggagggagagggacctgggattgatatgtaaaataatcttctttctaattaaaattaaaaattaaaaaaaaaaaaaccatggaactccacccagaggtctgggttttcaacaggaggtttgtagcccaaatgacttatgtggtgattctgctgtaattaaagcagagtggtgatgatttgcatataattgtgcaacaggcatttttcaagacacgtcttcaaactccatagaggatttagactaggccaagacaaagggagaaatccctcaactcaggagtaaagggcaaattttcaaggaaaatcttgttggttgtaagaagctttaaaacatgaacagaatcaccagacaagagtttatatgctgcaaaagtgactggaaaaaaatccacccaatatgtctctcagtgtggctcacactttctatattcctaatacaactatatctgaaggactcacgggactatccagctatcggctcctaaaaagctgtatttcatttcttttattaaaatgaaggatggattaaatgttgaaagcaaagttcattgttttacagtaattttaaataaactgaatttgcaaccctttatagatgcagcgtagacattctgagtttggaaatttcctttaaaaggtgccatgttcactaagaatactgtgtggaaagtgcatttcaatagtgtaaacattccaacattttgagtcagagagtaacttctgatttctctagttaaatgtcaccacatttcaactaaacagaatgtgtctagctagtggccatcctgaaaattaaagaccttaaagtgttgttcttctgttcttttaaaaatcaactctcagggctgaagagatggctcagaggttaagagcactgactgctcttccagaggtcctgagttcaattcccagcaaccacatggtggctcacaaccatctgttgtaagatctggtgccattttctggtgtgcagatatacatggaagcagaatgttgtatacataataaataattaatctttttttaaaaaaaaaacctttttaaaaaaatcaactctcagagcataatttgcatgcaacaaatatttaagcggggccttccaaggaaaataatacatgtcacagatatttaacatttgattcttgggagcgggagaagaacagacactagctaaacatcatttcaaaagttttcctaagattttatttaaaaagttaaagaattctgaaatgtcaatataatatttcaaggactaggtatgtctcaaaatactagtcttacaaaatagtgtttttacacccagacactgtattttatttagaggtaattagaattgactccctggacaactcactgaaattcatatcatgtattcaattacagaaaaatgtcccccaatgcagaagatcaattatgtgtgactgcttagttgattaaagctcgtatgctccttctacccaggtgagtttttttttcctttttgtacatgcatttgttagaggctggatttagccaggcatcacaaaaatttccatttgtcaggaatccaagcattatcagagaacgcaaaatgctaaatactgccccacagagccattcaggaatttatacatcacctattctgtgctcagctgtctactgggcaatgtgaaactaaagagaacacaatgtgtgtgatagttagtgctggtccttgagagacaggtttgcctcaggaatcaagcacacaatgaatgtgaggaagtcattacctctctgagcttccaccttctcaactctggagtcccaactttgcagggctgtgggaagctacgggatgcacacaaaccatgtgcctaacacaatagatggttaacaaagtataatgactgctatacggcatggagtcttgaaaaagaacactgaacttagaattattaaagaattcataaattctcaatcccatgggagtcactgtgtacctctgcacaagggcagagaatggatgaactaggcaagctggggacagtcaagtaagcccccattggaaaggccagacagagacgatggggagctgggacagtgagtacaacacctaacaaagaacaaaggacatggctgtgagaatgctgggttgtggagcaaagcatgtgaagaagaaagcccaggaatgttctgcatcagtgtgcaggggggaatccatttacctggtccccctgatgctaggaaagacctgtggttgaaggatgattttctcaactccatcaagataatgaggtttagattttctctaacaggcagttttgtttgtaaaagaataaaggggaagttaaggaaggcaatgaaaaaaaggggagggtgaagacacttcagtatgctacaacttctacctgttctagagattgcgcctaaggccttgggcatgctaaacttgcttcatcactgagctacccctcccaccagtctatgattctttagtacagatgcctgcacggtttttgcaaacatagatctcggatctctgacacagaacattaatctgtgatctgctgttctgctttgtacaatttccatgcccacttcagcatagggcacatcaatatatcagtgtttggcagaaacagggcatagtcattccagatagaaaagctaatgcagaaatgtgaccatcttccactccaaatcccaccaggacagcctgtcagaggaacctacagtctgtatttaaccccaaagcatggctctggaatggcatttcctgtgtcagaggggaaactgggcctaaagacgagcaatggtaacagaactccactgtggccactactcaccacatccactcaggaggagccagaaggcagggacacgaattagaaggttgttacttacctcagtcaggcaaagtcaccctgtttctgagagatctaagcagggacatggcatgtaggttcgagaagcttcgtgaactgttgaatgagaaaatagagttggtccatgtcaataccaaatctgctcacccaagggaaaggttctttctcctagcactttccaataacaagtgcatgaactcacaaatgcagccctccaaacacagaagtcaggcatgtctcactcaactttgcatcaggctatcaattcatgtaaatcccacaaaagggctgttgactgatagctcacaacataagcttgaagtttcagagtgccaaaggttaacccaagcaccagaaagcccccaaccagagacttcaacaaatatggtgggcactgtaaggaaatgagaagttcaagatctgttttcaccatccagatgcttttaccacaacgtccctctccttctagactagttgctaggatatgctgcctccctagttacttcggtgcccaaatcctttttgtggaagcctttcaaatcatgcatgcattttttctttgtgtgctgtttggccttcaaagtcagagatgcatctgcagatgtaaaattttcaaattatgaagcactaatatgaggttgataatattaattttcttttcacaacaataccaaaaagcatacatccatgaatacccaaacagaaccaaggaaagtttatggagagaaagtagaagaagtgagaagaggatgagagggggggaagaaatagaagatggtatggaggagcacgggacagggagaaatcaatgagaagaaatgagaggggccaaccaatgtccaaggataaaagatttttcaaaaccttaattcccctcatcaacttctgtgtcttgtcaagagttcctcacaagacttttacacatgaaacttaactccagcctgtttagttaattatggaaatctaacatggaaaccattatttccctgtgtaaatttattcaccaggtgttgtccacccactgccctcctgttctcaagctgacaagagccgcctgaggggcctgaggagaggggggatccacagggagctgtcacatcattccagaagatgccagctggaggaagcaaggctgttccccaccccactgggcttgcattttttaaagataagtggttggtgagactgaaccttagcccagggtctgtgttgggaggagttcccctagctaaaaggcttgctatgtgctctacaggcagatctaaacattcctgctggggggattggggagggctctgggagcccactggtgttgtctgcactcacaggcaaaatttgccagccatgtacacacctttttcatttccagctgtctccaccaggtcccccatcacagggataaaagacagttttttatataagttttggagaacctgcaaacgtctgagaggagcaggattacaggcagggggagcgggaggcagctgaaccaaggtgtggttccagctaatgctgagcttcaaggctgaagttttgcatgaactgtaactgagaaccacctgggctggacaccaacaatagctgctaatacatcacacagttgtaatagacagcaactgcagatcaccctttgggagaagagggatgcattacccaccatctggcaaggacattgtccagaaatgggacgatctcagagtcctgagcagccatacctaaagcacttgcttcagggagtggtctaggcaggcaccagcagcagctcacacaattggcttcttgtgttacccagagccctgtgtttctcaccttgagttcagtcctctgggaacaacatctctgggtattcttgtgggctaacacttcatggggtcatataagaggaaggttacagggaaacatggtctatgctgctcctttagtcctggctagacctgagagtttataaactcatcaccctcattgatggccacgagctttttttcactcagcttctcttccttttggtctaagtgatacactagaggaaggttcagacctcttcccatcttaccatgcttttattatggttttacagagtttctgtaactgcccatctacagttaaaattggcagagatagactgggtgctggtggctcacacctttaatcccagcacttgggaggcagaggcaggtggatctctgtgaactcaaggccagcctggtctccatatcgagtgccaggataggctccaaagctacacagagaaaccctgtctcaaaaaaaaaaaaagaaaaaaaaagaattaacagagatgaggcaccctcaatgagtcatctgaatgtaaaatatgaccctccctgtcccttaacatggcagcagctttgcatccttacaatgacactgtcagctacactggccaatagattcattctttttaatcccagctctattgctgtatgaagaatccaaagtgaccagtcacaatttaaatagctttaaatttagtgtgattccatttggatcctcatagaagtctctgctctgcccaggaatcagagaccatagaaccacacaaccaaaagcttcagatacaaaaagaaaatctcccaaatgagttaacgtgatgaaaagcatgtttgttcctatttctataccctgatttttgagacctttgtattcttcccagaggtcacaggtctaaaatgtgtattgcatactgaagaattgaactctttccattttagaatagtagctacaagctggatccttggtggagacctggaggaattcctgccaccatatgctgaaatttctagatggtatgatgtaggacaggaccagtgaatcccatggttctgtgctcactgttgtggctcctttactacagagtgatgccatagttaaagtgatgttttgtaggataccagctccccctgtactctgggggcactgtatgcagggaacaaaaggaaagggaaatccatacctgaggagtgttagtcacttagcatggtgacttgacagctgagagaatcaccttagaaacatgtactccctgcaccctgaccagttgtgagtttctgcattgaaaccattcattgcacaaagaaacttctctgatgtctgaaacctttgctaataaacaggtatagagatacaaacttagagaaaaaaacttgatgcaatgttcacttatcagaataatagtattatatttatccctgaggtatgtgagctccccagccatgggttttgaacataattatagtttccttctatagagcatgacatacatccaatcacaaaggtgctggttacacccataacatttacactgcactatggcactctgttgagtaacacctttgtgtaataaattgcactccaccatgatcaatggtttgcaaacctctctctccttccacaggctgtgagtttgcctgttcactgtagggttgttctttgacggagatcagcatgatattgtcaaaactcaggctgtagccacaatccccaaatcaccacgaatgtctgctctcctacagaacagaacagaacactcacaaattgaaactaaaggcatgtcagatctccctgcatttgaactgataaagttcactgctgatcaaaagtttgcacattttgatacagcgataatcattcctagtctatcaacatggaccaatgatgtttcaatcctagttttgagaaactgcagtatttctacttataattggtattttatttaaaaaaaaactctgatgataataaattttaatttttaaaaggtcccagccatggccaattttatgaggctctttttttattatttcattttgcttcatttgttttgttgttgctatttctcttttgttttgtttgtttgcttctttttgagacaaagtctggatacagagaccacgctgggatcctcctaccccaacctttctgctggtagaattacaggtacacctaactcatttttgtttgtttgtttgtttggagtgtttttgaaacagagtctcacaatatagccaaagccagcctgtgttcctcctgcatcagttttccaaaagctagaatgaccaggcatgtaccactgcacctggcttattgctaggagactccattcctcccaagagccagcctgcctgtcaatcagctcccagacacatcctttccaatttggccaaaccaccacactgaggcctggcattaaggtggaccacatggatgatgcaccactcaagtccaactgcaaatggcctgtgtggtaggtggatttgaacccaggagttaagtataaagattgcagagaatgggcacacggtaaaactgaacaaagaacaatgtgtgtcctactctcagacaggcagtaaatcgccagtccaaaatcacgttctcagtttctgctttaatttctttctgagctctaagcttcctgaaaagaaaaatcaagattctcaataggggccaaactgactgatttatttgcttcacagaggtttcaaggacttgaaaaagaaatgtgattctaatttacagcttttaaaactcactctgcttcaagtggtttacacattaaggttgtagctacatgtcaacatggcttgttggagagtttaaaaattcaacctttaaactttgtggcaatggcattggtggtgatggtggtagtagctattcttttgttggttataggggaagttaaaaaaccagtctggctagttttcctcctgactgatttgacagctgatcttgatattgttgttaaaacaatctgcaaggtgctttggctgccagctccccagaagttaaacattaagggcaaagttcataactacataaaccaccttcatacttcaacctggactctccatcaacattttagcagctcttaaaatgggcttattagagttgggtcttacaggatacaatttctagcccatggctgacactactcagtgattaacaaatgcctgctgggtgatccctcccttcaagaggagttcacaagatgggaaatgggatgtggaacataggctcaaaacttatctgagcatggagtgcactgtctccacttgaggcaaccgctttcagatgttaccctcagggtttcttgctaccatgagtcgtcacagctgcttaggagtaatcaagtgtgcctttaatttgccacttctcaagtcttctttcataaccacactactatttccaaacaaactagggatgggagtccaaaaggcaaagttactactgtttctaccttctgctggcctcttcttcctatgttcttctccctgtgaacacaacaaaaagccttttcttctcacttagtaattgttcataaacctctcatgctgggctttttcctccctgattcggtttcatggcttcgagtcccaggcactgcatgctaaagattgtcattgtcaatgtcagtatctcaagatgacacagctacatgtgagagtaaatcaattcactgaaggtgttcatacaagattaagtggcctctctgccatattatggagaagagggtcaagtaaaagtcgtgttgggtctctttcagtcctgagactctggttgtggcaaatcagtttctgtgggccacatcagcatagtgggatccaaactgtcacacgaatagcaataagcgccttcctagttatttctaagcatctctggaaaaggctcatcatatgtgcttgtgagtcctgttgttaggcagtgtaacatctggcctttcctttctcccctgctcgacttcttattgtgcggactatattttgaaacctttgatgcaatgaactgcttgtcagcacatggcatgactttcagaacacactgtccagtcgcccctagcgagtgcattaatctttctggcctgtacatccacatccaccaggtgctgcctgtgatgcatagaagcctccaggtaccaaagcaggtctagagttatcggattcctcatcatgaaaggtgtcaaatggacagagagatgaagaatgcctctctccctgttggtgatgacactattacatggtcaggaaaggcaggctgaatcattggcccttggaagtagcagtatccatccaatcatctccatccaatcatctccatgacctcgtgatgagcacagcacacttcctgcccttttacttttcctttggtcatgtgacttgctttgactaatgagaagtttggagataagtcttaagcagatgtctttgtccttattctttgttctgccatcacagtgagaacatgtctgggtcacctgaatcccagcataaaaaccaagtgaaaaatttacatagttattgacaaatccaaaatctgcatcagagccacccctgttcacttatagaatatggacataacaataagatactgaattgagccaggcagcattggcacatgcctttaatcccgaacccttgctatcaaacgatttcaatgttttctttgcctttgtggcatctgcaaaactcacaagcatacaagcatttgaagacttggctgcttacaaatctgaatgcaaagaatagcattagctctagagttcattgtctaccttgatgcctgagaatttattgggctaagttttttaatagcagtctccaaactgggttgcccagatctgtaaagaatctgctgaaaaaacccaaaagaaattctcagagggctggggaaatgtccatggttttagaagggacttgcctccgcttgtgtgtgtgtgtgtgtgtgtgtgtgtgtgtgtgtgtgtgtgtgtgtgtgtgggctctctacaatgtttctttgaagacacagttcatttacctcattgctgctgttggtggtggtggtggtggtggtggtggtggtggttttgagacagggtttttctgtgtagccctggctgtcctggaacttgctctgtagatcagactggactcgaactcacagagatctgcctgcctctgcctatcaagtgctggaatttatggaatgtaccactattgccctacttcattcaccttcttaacaataaatgagtccctggaaatcagagtggccctgttagaaaatataatttttagcctcttaagtgaggattctctagtacttgatagctgtcaagaaaccctactgtgttttcttggttgaaacactcccccactttctactagactgattcataccatcccttccattcttaaacccataacctcactgtcccatctttcccatactgcttgtgcttggtgttattcttttgtttaaaaagaagaaaagagaaatattgagacagacatattgactataagtttattataaggcccggtagaatggggagactaagaagaggaacagggtaatggctgaccaccatggccggtcgccatagagagacagagtggggaacagagagacggggggagagagagagagagagacagagagagagagcgtaaaggtgcaggggcctatcttttaaaggggtcctctgcacctgcgtgcagacttctttcccatggaaccttgggctgcccagggtattgcctgagtggattccaccaggtaacaggggcaggccagcataatgcctgaacctttcacttggttcttgacaacttgacacaagctatggtcatctgggaagagagaccttcagttgacaaaatgccctcaccatattggtctatgggcaagcctatagggcattttcttaatgagtgattaatgtgggtgggcccatcccatgaaaggggagtaccacggctgggtaggtgtgtaagagagtgagcaagccattgggatcacagcaataagcactattcctccatagtctctgctttagggcctatgctgtggaataatcctcttgtacactgtaaagatttgtcactcgaattggttaataaaacactgactggagagtatccagataggaggcataggtagaataggtggggtgaccaaactaaggttgatgggaaggagaaggctgaagccaggagtcgcctctcagacacagagggaacaggaaatgaacgtgccaggctagtaaaggtatggccatgtggcagagcataaataaggaaaatgggttaacttaaaaatgtaagagctacttaataacaagcctgagctattggtcaagcatgtacaattaatataagcctctgtgtgggaatttgggaatcagctaccaggtatttgggaacaggcgtttgaaagaggaaatgtccgactatagtcctttctctagattccttccctgcttgactccttcccccccccacctgcctcagtaatagactgttacctggaagtctaagataaagttaaccccttcctccccaagttgcttttggtcatgatgtttcatcacatcaatagaagctaagacacctctccaatacggactttctgttctacccaaatctaaaatgcagtggatgtgttagttttctcattgttatgacaaaacacctgacaaaaagtctatcatgtcaaagaaagcatgacagcaggagcatgaggcagctggccacattgcacccacagtcaagaatccactcaccttcattcactacaggtattcccacctcaggtaaggctctctagaatcaccctctaagacacagccagatttttgtttcccaggtgactctaacctcatcgagttgacaatcgaaattaagcatcacatgggcacccaataattactcatcagatgaatgattagactgttatgtgagagcaaggtatcaaagataaaactagagatttagtacccaggcacattacaaatgacacatagttccaatgtttcctccagctcatgttctctaactacacagggaggttaggctccagacagagagactgccctgaatatacccatctttcctgcagacagctgcacctcctcaaccagagtttctccaggaatgcctaagattctacattcaaaagaagggcagctgctctgctaaacaactttcaaactctggcatcaaatgatcccttgcaacacaaacaatccattgctccaagggatctgtttggttttgccaagagcctagtttgtacaggactttaccactgaatgaaagccccaggcctctcaaaaccctcagttctgggccaaccatgacagtggtcatcctggctttaaagtgttcccagcaggtacgtttttctaaaggaatgactggggttttctggcactctccgctgccttcctttcgtttctttggcttgtatccaaacaaaaacaaaaccatatatatatatatcctccatactctagtctggaaatgtgaatttcactagcttggcatttctcagaactttctattgagcaacacaaaataaatacgaaatcactgtatagtttttatatgatcacatgatacatttctcctcatcttcattaattgctactcatctatcattattaatatactcaagacacaaaaactgaactattctttaaaaaggccagatggagagatgatgtagcagttaagagcactggttgctttttcaaagtccctagttcaattcccagcacccacatgacagctcagaccttctctaactccagttccagggaatcccatgctctcttctggactcagcagatactgtacacatgttgtttacaagcattcaggtaaaacagtcacagacataaaataaaaataaaagctcaaccaaaatttaaagatgcctgatttggacagtaaagatcaaaggaaaacaagatgctcagagaattagtttcttaaattcaacccagctttggggtgactgagaagaatgtttgtgtgtccatcattacacaatggttgataaattattaaaatgtcatttcataactaatagtcaacttttgtttgaattatctaaaatgaaaagaaaccataggatgggtgaataaattttatgatgttcacaaaattaaattctctacaagggaaaaaaaatgaaatgccaatttgtgcaagagtacacatgaatcttagatttgaaaactaagtttaaaagccagacatatgttcctagcatataatcccatttgctttaaggtaaatctaagcaacactaatctatagtgctagagacatcagtacccttctgctctcaccagaaatgaagagagttgacaaagattttttaactgtaagagaaagttagggagaaccctggaaatctgtagagattctgtgatggcaaaacaccatttttcctcttccctgatttcttctaattataataatgttcgtaatatctatgtaactttctatgtaattatctatgtaacaatctatgtaagtaaaatgtgttctctgtcctaatgagttactattcatataccacataggaacccagtcattcccagcccagaaaattaaaaaatgttacacttaataatagaaaaaaattttatgtaggttaaaactacaggcactgggaatggagagatggctcagtggttaagagcactggctgttcttccaggggacctgggtttaattcccagcacctacatggtggctcacaatcatctgtaattctagttccaggaggtctgatgatttgtggcctctgtgggcactaggaacacatgtggtcacacacatagattcaggcaatacacccctacacacaaaataaaacaataataaaaaacttttcttttgcaaatttaaaggcactattgccagaagacatgggtaagtattggcacacttatctggcctttggcatacacactaagccttctctaacttcttgctatgtgacctgggaggtggataatgttcttatgcccattttacagtttagtaacctgaccctcatgtattttaatacagctagtctacttgacatttctttatattgtcctcccacaaaagttacatttactgaactatataataaaccagcttgctatgtgttaggtttttttttattatttctagaaaagttttggtttttttgctcttggtgctactaggttcacaatagacctgggttactgaatgtctgtgtctttccttctccttgtagcagagaaatggaaacttgctttttgctttccatcttcacataccacaccgaggaaggccaaggctctctgggcatgccagacctggcatttccaacagtagcctaatgtgccataaaatgtttcagaaagatattggtttactcctcaaagtgctgatcaagttctcctaaacaggatcatggtgaattttataccaaaccaaagccaaaaaagggaaggagtttggggtctctacttcgaggtcgagtcatccgagcccctttcctctgtagtgaagggagacgagggctttaaatcacaaacatcattgtcaatgagcacaagaaaacctaatgcaccagagggcaggaagatcaaagcttcgcacctggagagcaccgcacggtgaagatttaataaaacaatgccgccttgaaataaatcttggaaagattgctcgtggacacacactgccccccaaatgactggaggggtcatataacggatatctaatacacacggcttcccaatgggaagtgttctcttccactcgccgacttgctgacatgaggcagagaaactattttggtttaagcctcttttgtctaaaattgacattacagattttggatcaggacaaggcacatctgcaagctggcggaaataccaggatccagcctgctcctttgattgttacatttaagatatcatgtgtgctaccagctcagctgctgcaaggcattagtggccgttactccggcttgtaaagtactttggaaatactatagaccaggattagagcagatgagtattccacatggcttcaggagagatgataaccaagaggagggctggatagttaaagtgatctatgagctgcatgtgggaaacaatatctttaaaatcctgctaaaggtatgcatgtggatgcgtgacagtagtttggaaagtaacgtgccagttgagctgtagagagcagggacaatgaggagggtgggaggtacatatgtgtctaatccttttgtagggttttttttttttttcttgtaatggtctgaaagcaaaaccaaaactgaatcccagcacccactgctgaaatgtcactttggatctggctggcaagttccatggctttttttacacaagtgagaagcaagtcatatagaagctgtgagccgagcgtcaggtagcagggggttcggtattacattggacataggaaactttagcatgtgttgataatgtcctggaaacattccaagtgataaaaataagatcactttcattcatataggtcactggatgctgctagatcccaagtagcatatcgaagtcgatgcgagcatatctaaaaattataaatcattacagttatatgatttatgcccacatggtttatctatctgatactcacataatgagaaacaggcatccacatttaataagcacactatctatgcaacctgatgctttgagaccacgcagcatgcccgtcccccccccaacattttgcccacgtgacttccaccactttgttggttaggaaagataggcattatcattcataacttacaggttatgaaactgcatcccaaagaaatgcagtgacctctccaagtgtccacagagattaagtagcagaggcttatggagccccaacttgccttctatcaaggctaggataaattctagaatgtcacattgggagcgtgaacaaactgaactaatcgaatctgtcaaaaccattatcaagatgcactgggattcatagatcccacaagaaatgggatggcggaaaagtcttacaaggttatcctgccacaatattgcccctgtagtaaaatacatgcctggcatcattgactaggaagagtttagccagaccctggaggttgctgcaacatgggcaaaaacatttattctctgcaatcaaggtttgttctatgaggagactgtatgcttatctctttgtaatgtctttcacaacaaatacttcagcttatgatattcattcaaggtgcttgctgttctaatcgagcgtatgttggggcctgaactggaggttcttaacattgctcaaggtgaagaagagggtactattcactcctctagaagagacagaacatgtgagcagcctgcatataactttctgtataagtggatctcaattacaaagtatcattcagctcatctaattataagatatcatggtgacccagtagacagcagttgtgtgtgagaagaggaacacagtgaggcctcacagtggattcttaccttgtttcaaacactggaagtagctaaatgggcagctccgagtgtgtgacttagggtagacactcttgccagagctgagaaagaagacagagaagacgaattgaaaaggaagaaggcagaatcctacccatgcaaggctcactctgtgagcatggagaggccaaggctaaccatgccctaaagcaagaagtgtctagcaaatggcaagaaacagtcctctgtatattgactctgcttttccatcgcagaagtccattgtcactgtccaacttggagacatagaaatatgacaaagtcttttcagacagacagacccagtggttccgattgaagctttagtcaacttgcaatggtccctttagaacaggcaggcctgactaaggaagtcctcaaagtttcctaacagctggcccaagggaaggtagattgagaagccttgagggactgctttgatccacttttccccagctccagacctgcctcttgtgaatggccttccagcaaagcctgtgagtcccgaacccctgggaaaatgggcaatagagaatacagacttttgttcttcagctggcctgtcaaaattctttaatttaaaatatatcccctttctcacttgcatccagttattccttggctaaaatgtctccatgagtgtatatttcctgtttgggtttttctttaggaaaaaaaaagtccttagtccttctgacttggagaacaagtgtgccttgcacagtttgaagcagaaaccaaactgacaaaaagctttttattttttttatttttttaactacattagctgcggttacaacttcaaaccctggtagggtttcaatcatactgagatacatacaatttatgacaaaataaaataacactaagatacttgaaatataagaatattcttaatttaccattttttgcaatactgtaaaaatatacctttgtgcttaagtgaacatatcaggttttaaaggttattttcttcacaatcctaatagagattcaggggttgaagctgtgaatgacttttccgtggacttttaggaaactagggtttctgcccaacagtcagccgcggagacatttcgctgagcacactatattttcatctctcccctgcctctaaattctgaaggacacaaattactaacataaatctgccttgtccgcagagggtgaaatcatatcatttgggtgagtttggtttgctttgggcatttttcctcttatctatttaaagaaccatttcctaggttgctgatgatttcagttatatctgcttttaccaaagtaatctactctttccatcctgatttaatttcatttgtttccatttatgtgcaaaagacttccaacagcatgggaagagtaatatctctgttgctaggtaattgggctacaggcagaaggacccacatttaaaaaaaaaaagttgcataccagatgtgattgtgtacacctttaatcccatcacacaggaggcagaagcaggcaagtttctgtgagtagaggctagcctgacccacatagtaagttctaggccagccagggcaacacaataaggccctgtctcaaaaaaaagtaataattatgtttttagttgttgtggtggcatgcagttataaacccagggacgggaaggccaatgcatgtggatccctggagtttccttgcaagccagcccagtctacttgacaagttccaggccaatgacagacattgcctcacaaacaaggtgggtaatagctgaggaaaacagctgaggctgttctctgccatctgcactaacactcaacaagcgcacgtgcacacacacacacaaatgttgactacagattgcatttgaccttatcattcactcagtggctaactgacacagagtatattcagatggttaaactaatgatgtgaattaactagtgttcagtatttagcaataaatgctaccaaataatctcactcttgtctccttttctaaactggccaaaaaaagaaaggcaaaaaaggaaagaattctgaatgaagaaacagctatgaggatatagatatatgaatgtatcaaagaatgaatgtaatgtaaatgctgtaattatataccgcatactatgtatgtgtacatatgtaattacttattaaacatataacatctatgatattatactacaaattatgcttatcattacatatatacacacaaacacattaaagtttattctgaattctcagccaaaactgactgcattcctctagttgccaagattagggacagagagcttcctttccccaccagggaaatcaatttctaagtgccccacctaaggactgtatttctctttcactgccagctgatcctgcccctgctgagtctgtagacctaccaggctgtcagaatccaccccttctgcagctcattcagcaagtcagcctggagctttagtgcttagcagagactcagtaagaaggctaatgtcttggcagccatttcaatgtgtgttaaaaaaagaaagaaaaaacggcccaaatagaacctcatcggatgtcaacgctggcatttgagggggattgaaacctgcccagcactataatttattttgctaggaggtaagaaatcaactagggttcagaatgtaatccttcttcaaatattatttctgggaacacttttctcaccaagcatgaccccacaaattgaatcttgcctttccatctcaggtctacattccataggttctgttctaacagtaaactgtttatacaggcaagaagaaagttggtcttcttaagaagccaagaaaggcttaggagttcattctaataacttttcattcttttcttcttccccctccatatttccaaaacaaccattagagctcactgtaagtagaactcatgaaagtcacccataccaaagccagcacttttactaactagggagaaagatagtcaggacagcaagtaatattatgaacttcagatcatctaaagaaaaagccctgggcatgtgggtaaacttatttgctctagctctcaagcatccttcaaaagttagcaaaacatcttagcagaagaaaatcacaggacaagaattcccattgtgaagccaggcgttggcggcacacgcctttaatcccagcacttgggaggcagaggcaggtggatctctgtgagttcaaggccagactggtctccagaacgagtgccaggataggctcaaaaccctgcctcgaaaaaaaacaaaacaaaacaaaaaacaaaacaaaaaagaattcccattgtagggggggacacaatgacagtgaacatcgactattactgtttaccacttgtcatctatttggtttatccactggttatcaagggtgttttatgaaagaatccacttgccttcattttacatgcaaggaatgtaagatataaataagtaattgttaaatcaaagagctataagcaacatctttcaacccagtaaaccaattactaggaagaaaataaccaaaaaggaaacacacacacacacacacacacacacacacacacacacacacacacacacacacacacacactgtatatatgtgtgtgtgtgtgtgtatatatatatatatatatatatatatgtacgtgtgtgtgtgtgtgtgtgtgtgtgtgtgtgtatatatggtttttagatattaatgtctcagatcatagaacccattcatagaaccgggttttgaacccaacaagtctctaccaggaccaatccctgaattgcaacattatactgtttagtgctataccctggaatgttttccgtatggcacaaagagaacatgaacacctggagacaattagaagccaaaaagcccagcaactgtgtgttagtcatgctggcatgtttgggtagagttcagagtagcatcttggaaaaagtgactcaagccagtaggaaggtgacgggacctcaaagacaggaaggtggtaccgtggtgaataataactgctaatctccactgggtgatgatagtgcactaggcatgtttctacttgctttaattgtccactagctgacctaaataagatgtgagccttccgctcagggtcataacataccttaaggaagcacagagaaggaatgaaccttaattgtactgtagctgatggaggagtcccattaaggtgttaccttctcatcagtctcctcactcaccagacttcatttcagaaatggaatggagagaaagccaaagacaaatgtggttcattttccaacctcaactcaaccagcctttcaaaatcccctccaccagttttgttcactgactatctactctaattttcataattttagactgtacacatccatttgcttgaattcatgacataccactgagatgaattttacaaccaaaggatggccaaatatttttaacattgataaagttctcactgacttagtatggctaatagatattttttagcagtagggcttaggcaaagggtgggaactcaatgtaagattgctcttgtagtgtatacatgacttcagcaagctaggggtcagaagagagctcaaaactgccctgccaggtattcacatagtcccataatccaattgagtgcttcattttattaaaatcttgtctaaacttgtatgtggtggtttaatttcccatacaaagatatgttgaagaatcaaccataatttggcttgtagtctcagtcctttctggctgcattaaacaccacagactggtgggctcacataccacacaaacctacttctcacaatgctgagaagttgaggaccagtgtgccaagaggtccagcgctcaatgtgtgctggcttccttatccacagatggcagtcttcctgctgtgatttcatgttggaagatggcagaaagctctggcttatctcttcacaaatgctctagtcaagttctgataggcaggacccttgcaaagggctagtcaattcccaaactcctccagtcctaataatcatctctttgggggttgaatttttagttgtgatttttcagagcaaaacaaaacaactgaactcttagcaccagcatgtttatatacatgaaggttcccaactgtcctgtgtacattgaggattaaatgcaattataaaacagcacttgttgtccagttgaagaatcactttgatattcattacttagatttgaggggctggggagatggctcagtggttaagggcactcactgtctgttcttctagaggacctgggttcaattcccagaaaccacatgaccgctcacaactgtctgtaaccctatttccaggggagcctacatcctcacacagacatacatgcaagcaaaacaccaatgcacacaaaatgaaataaacaaggaggaataatgacttagatttgaaggcaaactcaaacattaccaatttactgaaacagacacttattcccctcatgtattaagtccagatataggtgatggctgactttaattcaaaggttcagcaacatcaatatccagtaactctgtgacctttccttttaggtcacaagatggcctctgaagttctgtccatgctgtcaacagtacagggtggaaggaaaagggcaaacaccagaaatcaaatttctgtctcagaaagtcccatcaacaacttcagccagcctcctccatcagaattgtgtcaccttatcacctacaagaaagggtaatatatccagatacctggccattctacccttaactaaatcagaaaccaagagaaattaaagggagattgcatatcaggcaaaactacaatctctgctacttgctgcccccatttcttttattatttaatcttcttttagcttttgtttttaattctcggacattcttaaatattgtgcagttgattggattttgttctagatttgtgtccctgggtctagcatttggttagtttcctgctatctccttgtcttcctatcttttgcttacagactgtgtttaatgagctcttctattctgtacacatttataatctcaatgttcagtgttgctcggggtatagcccagaggcagagacttctctgtatatcctaggctctgagttatattcccagcaccagaaaaaaaagcccaatacaattctgttgctcataatttatagtaactagtcaagaaaaaatataatttctctgcaaatatttttcctggtggatatcagatttcaactttgagtgtgtaagtggtaagtaccatgcatgcaccacaaaagaatccaagattgttgttcccttcaggcagtggtggctgtaaaagttggactttctctttaattccattgaccattggggtaacaggaatcaaacatgactagtatcttacttaagctttctactgctatgatgaaacaccacgactcaggcaacttgcttacacttccacatcacattctatcagggaaggaactctattaataaaggcaggaacctggagccaggaactggtgaagaaaccatggagggatgctgcttactagcttgctcactgtgccttgctcaacctgctttcttatagaacccaggaccaccaaacacaatgagctgcacccacccacatcagtcactaaataagaaaatttaccacaggccaatttagtagagttattttcccaagtgtggttccctcttcccaaatgactgtgtgtgtgtcacattgacataaaactagtcagtacaactagttaatacatttatcacattgactcatttagaaaaagtgacctacttttttcattctagaggaagccttttgtaatttgaatttttccctcttttcttttgtttacaaccattttattatagctttatttattttatgtatagcaatggtttatatattaaagtatggcttccttctcattaattagcattttcactttctcttcactgttcttcccctgtgccctgtctcttttgtttttatttgtgtatatgtgagtatgtgtctatttctgggtattccaggtgtatacgggtacccttggagttcagaagaaggcttcaaaggctgtggagttagtcggagaggtttgtgagccacccaacatgggcactgggaagtgaacctgagctctgtaagagaccatcaagtgcttataactactgagccatctttctaacttgaagtactcagagttctaaactttgtagattgttgtcaaaattactgacatcatatatcttctctaaaataatcacattacagattaacattattttacagccatatgttgagcaattcgatgtatcctacatttagtgggtttccatcttaatctctgctgtctcatgccatgacctcttccttctataggcagttagctatcacaggtaaaatctctccttcagaatttttgtaggaatgatgtatgaacattatctggagatgtttcttcatttaaagaaataattgtttttcctttgtctatatcagtatttgtatgtgtgtgcgacccttggaaatttcctcattttaaacaagttttttttctacagttgttacttccatattgtttattttgttgtcttccttgagaaggtatattctctctggactgtgcatctctgtatttgttaaagcaaattttatattgctctgctttgtttcccaggcccaaactgaactcaactcagcatccttacttgttctacaactctcatccaggaccaactcatttctaatgtccactgtttgctgggttcaattcacaaacacagcagtcaaacagcattgctgctctggaaagctgcctagcatgccaagcaaagaggatgtaagtactgaatctttgttgattactgaagagccatcctcatttcttcattcctcatctctccaaatgaagaccatagaataaatgctgtccaggatttttgttccttctattgcagtgacatcagagtcatgttgatgggtttttggtcctttgatgatcaatcctggttatatattccattgtcatctgtaagagtgaccattagagaatagtgtacattaaaagattggtctcaggttggagagatggcgcagcagttaagagtactggctgctcttccagaggtcgaggtcctgagttcaatttccagcaaccacatggtggcacacaaccttctgtaattagatctgtcaccctcttccagtctgcagggatacatgcagacagaacactgtatacataataaataaataaataaataaataaataaataaataaatctaaaaataaaaataaaaagattggtcacttggtgtcaaagagatagctaagaggctaagagcactggctagtcttctagaggacagaagtttgattcccaacccccatatggctcacaactatgtaactgtaagtcacagaagatttaatgccttcttctgtcctcctcaggtatacatagaaaataaataattttaagagatttttcttctagttccataattctcagagttggtaacaataataatgataaatataataactgctagtatttctatgtgccagaactacaccatatttagttcatgtaaattttacatgaagaccatagaagggatgcttatctcttctctctcttgttaaagacagaaaacaggggatttgtgtgcccacatttagacagcaaatgtaggagtcagcagtacagcctagtcctttttgactttaaattttatgacctccgaaggcatcatatggtgactttcttatatatatttccattttttatttgagttagaaacaagattgttttacatgtcaatcccagttccctctccctcccctcatcccctgccaaccccccaactaaaaccatacctatcacataccctttctgctcctagggagggtaaggcctttcatagggggtcttcagagtctgtcttatcctttgggatagagcctaggcccacccccgtgtgtcttggctcagggagtatccctctatgtgggatgggctcccaaagtccatacctatgctagggataagtactgatctactacaagaggccccatgaatttccaaggtctcctcactgacacccacattcatagagtctggatcagtcccatgctggtttcacagctatcagtctccgttgtttaggtcagctgtttctgtaggtttcaccagcctggtctggacccctttgctcatcactcctccttctctgcaactagattccagttcagttcagtgttagctgtgggtgtctccttctacttccaccagctgctggatgaaggctataggatggcatataaatcagtcatcaatctcattatcaggggagggcatttaaggtagcctctcctctgttgcttagattgttagttggtgtcatcttggtagatctccagacatttccctagtgcctgatttctctttaaacctataatgtctccctgtattatggtatctttaccttactctcctctattcttcccccgactcaaccttccttctccctcatgtcctcttcacccctcttcttctccccttctcattctcctagttccctctcccctccccgcatgctcccaatttgctcaagagatcttgtccctttccccttctctggggaaccatgtaggtctctcttagagtcctccttgtttcttagcttctctggtggtgtggattgtaggctggtaatccttttctctatgtctaatccatatggtggatttctatcaggtgaaaagaacaactattcagaatccatcaacatgaaccttgaaccaggcaactgtaagacaaatgttcaggactggagccagtactgcaagtcagcagctcaccactgaccttccatgttcctccagcctgcagcccatgtttcctgctaaccaacttcttcccataggaatcaataggtattgagttcagccccacagcagctcagggtcagagtgggcttaacacacactcagtgataactatggcataccttctcttttactctgattcaatcaaattcaactaagttcccaagaccagttagtagtagggttgggaggggaattgttgacttttgatctcatgacacacattacagaaataagtaggtttaaaggctctgaatagctatcattcctgtgttctaagtcttaagattgttaaaagaatataagatataaaataagatattcaatcttggttatatgtgattagccaaaggactttaagcagaacattggtctctctctctctctctctctctctctctctctctctctctctttctctctctctctctctctctctctctctctctctctctctctcagctccctctgtctctccctctccctctgtctctccctctcctcctccctctccctctcttcctctctctcttcctctctctctccctccccctctctccattgcactctgatgggggacgtccttctgtgtatgtttatcttattggttgttgaataaagcactcttcagccaatgaagcagcaagttaggctggactaggagtcaaggaagattctgggaaatgtagtgaagtcttgtgatccaggtaggaagtgacatagcaggcagactcaggatataagcagggacaatcaggaagttgttctcttccttctcctctctgtgcagttgccatgtgatcccaggaagacagaacacattctgccggcatcctccataagataagtcttataaaatataaagattatttgttatggttgataattaagactgagttagcatataagaaatcctagtcattggccagcagcattgtacctaatataagtctctgtatgttattttggctcaggcggaatggcataatgacttatcattacagcactcttagtgtcttcttgtccttagtactaatgattcctctttagaattcagtttctctaatcaagcttggaaatctcatcaactcttgctgtgggcgaagattatcattttattggggtgtggctatattcatctggaggccaagaagccactcaaaagcaacagaaatcctagatgacttcaaaaaatcttcaatcagctcttttgggttcaagcaaccaggaaagcagcacatttaagttcagccttcttttttccatgataaaagtagttcaacatggcaagtgcatctttggatctaaaagaagtagctgaaaggaattttctaagaagtttccagatttcatgatcttcctgcattgaaactgagaattattttattcctgcaatttatttgcttacattcacctttattacaaggcatcatctgtctaacatattgaacccaataataaccctgcatatgtgggtaacatgcctttgttataaggaaggaatgccaaagtgacagagataataaacaaaggggccaggattctacctctggtgacaagagcccatagctcatccttgtcttgtgtggctggtcagatagtcaaatgtctggctgctgaaagctcctgttagatgactgtaacatgaaaaataagggacccaaagactaatattggggttcaaacatcaagctgaagatcagaaaagcaaagcagctggtcactagctcttactctacctcaaactgaaagtctatcctggctccaccaaacatcagactgtaacctctcctctaagtggctggagaatcctgagacttcaatgtcttcctatcctcaatgtgactggagaatgaattcctgatactgactagtgaagaccctgctcctatcatttatacctctctagtgctgggattaaaggcatgtgatcccagttgctgagatcatctttatgagagctgtttctatttaggactgcatcaatcttgtgtagattttggtggccttggactcaaagagatccgtctaccacttaatcctgagtcctaggatcaaaggtgtgtaccaccacctcctagcttctggccactgggattaaaggtgtgtatcatcactgcctgatctccatagcttgaggctgactttgctttctgaatcctcaggcaagctttaataaatcataaataatatatcaccccaggtgacagccctggaaaataatctgccattaagcagattctgcaagccttcacagaagcatggtgtcatttctcttttctttctcacaggagcaagtaccacaggatgagatcattgtaaagtctcaagtactgaagtcatcaagaagcagagagtccacagctagcagaagtgcttccatctactgtaggagtctgccttcctcagtatgtggcttcccccattatagccaacagtgagattttgaaattgcaatgcttcttctaaaaagaaagctcaattccctaaagaaaggtagccaggagacactgatgtttcaatagccaggggatcattagtctggtccagtaatggggagttgaatggagcttcaacagaaaccactgtggagtctaaccaccaaattctcattccaagcaactgaaaggaacaggggtcagtcttgttctctctaagggcatttaccagaagagatttgaaaggattttgagcatcccgtttttcaggaggccacaaacaactttaagggacattggagaacctggtctttactattgattcctgcatccctgggtattggagaatctggtcttcaatattgaggcctgtatttatacctctctagtgcataaactgcaagtttagttgctcaagacaatgagaaagaattagcagcgtgtagtccacacaatttgatcctcaaggcagttcctcccatgaatgggtatctccacttgcccaggttccttcggtgattccagccatccttctcactggattagcactgactgtgagagccagttgttgaggtgtatcccagtcttatttccacctgtcaggggctttgaacacccacaacttacagttctcatccttatgtcaaaaagcatctacctcccttacagtccccactcccaatcctgaagatttctgacacttaagacatttctcttccttgcatggttgagataaaaaaaaatcaacattacttttagaggaacacagcttcctactcacactctaatgtattttttaccttaacagctgcacttcccataatgtcatgcaactgtaactgcccaccggtgaatagttcccttacacacagaaatgttaggcttttctgatcttggagcagggaaggtctcttctaattctaaagttaagaagttttagtgactcttgggaagcccatgtccactctagaacgtgtaccacagccccctctaaaattttctttcccattccttccactcccccgcgcttaggtcagattgaaccattccctaataaagtgcaactttgcttcattttaaaagaaagaactgactttaaggccagcacttcactaaaaaggagaggctccagctacattcaacatcatatacaaaccacattatacaaagataccaaagcttaattgggaaaatggtcaaaatacatgaaaaaaaaaaagcagacacataaatggcaataaatctatggagaaatattcaacttcattaatcatctcagaatatgaagcaacagtgaggcatttttatttaccttttatctattctcgtggtaaagattaaagagacttgcatagttagaaggaaagatgcattgttaaaattgactggctcaagaggaagctagtaaagccttctggaaagtcaattagaaaataatgaaaaccctcttagatctcagaaaccccccatacacagagagagagggggacagagggaaggtaatgaataagtaagggaaatgtttatacaggagtgttcatcttagaattgcttgtaagggctagaactctgaatgttcagtgctggagggatgagaactgaactttcatggaacaaatgctagggaaccattcagatttctaagagaaatctaaagctactgaaggagaatggtatttgttatgtttacatttaaaaaaaaaaaaaaaaccttaccttaccttacctaatggtgcatgcctcatgcgtggatcctagcttatgttgtcgacctgcatgaatggaatggatgtgaaaatgggctaaaaaactagaaaaaaggatagcataagatggagaaaccacgtgttgaaaagggggaagagcagtagatcacatgaaatacaaaagctgaaaagtagctatcagtcaaggagtaatacaacgggaggtcagggcattagaggtgatgatagtgaaggaacttagcaagagcaaagtttgtttggaatgccataatgaagcataattttgggtgctgagtagatagaacatactttatatgcaatattggtttcagaaaatgtgtgtttatatatattcagatatttacagtgtaagtggtctgtctgagaggatatatatcaaaacatttcctatgattagaacttcttttttccatatctttactttctaaactgctcacaaagcattcacattacctgggaaattttttaaagtcataataaaatgataaaatgaagacaaaaaatatcattgaatatttcccaattctctagagagaagctgactttttaagtacccaaaactataaaacaataagaatgaagtctgattatttatcaaaataacaagttttgtatttaaaaataaaacatcctattttacctcataaatacatatatatgcaaatattatgttaaaactttaaaaatgatgagtaattattttataaggaaacacttgcaacaagctttattccttatttttttttttttttttggtttttgatttttcaagaaaaggtttctctgtgtaggcttcgctgtctcaacttactctatagaccaggctggcatctaactcagagatcaagggcatgcaccaccaccaccaggctcaaattcttataataaacaggaaaaaaaacattctaaaaatggaagtgaactcaatggttaagagtaagcactattcttacagaggactagagttgagttgttagtacccatgtggggcagctcacattccgtaagtccagtttcagggaagatgatgccctcctctggcctctgtgggaacctgcactcatgtgagtagacacacagatatacacatacatacacccatatacacacaattaaaaataaaacattttcaaatgaaatgggaaaaccatgaagcattcggtcagacctaactctcaaaatgagaaagcccataagaagcacacataataacactcttcatttagttattaaaaattaaaaactgttataaaattcataagtattgtgttagaagttgtatgatgccagttttactgcacatttctttagctgtggaaattagtgcaatacttctggaaaaccatgtggcaaatgtcatcaggaaccagaaaggctaattagcctttgacccaatagatgctatagaggatttatctaattaaaaaaaatggcaggcaaaatgatgtttctgaaagcttctatttcaaaacaatagaaaattgtaggaaatgctttaatagttattttattatctattgatgtgtatatgtgagtgtgtacttgtatgtgcacatgggtttgggaatccaacaaaaccagaaaagggcatcagatcccctgaagccaaatttacaggcaactttgagccaccttacatgggtgctggaagccagcttaggtcttacagaagaacagtattgttttcctaactgttgagctattgatgagccattgctgaggcatctctcctaaaagtaacagtattttaaatgtcaacaaaaaatgcttacacatattttgatataatacaactgttaatacaacatgtatgctgattatataatatgaaaaagtctggtgctatataccaaaaaacaggatactgatttgagtaatggcttaggctgggttttattgctgtgaagagacactaggaccattataaaaatcttataaagaaaaacatttagttggggctggcttacagtttcagaggtttagtccattatcatcatggagagaagcacagtggcacgcaggcacacatggtgcaggagaaggagctgagagttctgcatcttgatcctcaggcagcaggagactgtgagccacactgagtgtagcttgagcatattcagcttcaaagcccacctccataatgacacacttcctccaacaagaccacacccactccaccaaggccacacctcctaataatgcccctccctgtggaccaagcattcagcacacaccagtttatgggggccattcctattcaaaccactacaaatagcatttttaatttaattttgagattataatataattacaacagtctttcctttccttcctccaaaccctcccaatagcccactacccaatttccttcaaattcatggtctcttttgtcactaatcgttattgcacgcatatctatttgtgtatacatattcctatacatactgcttcagtctgaataatatgttatttggatgtatatttttaggcttaccatttggcactagactaccagttggtgtgctcttccctggggaagagcacctctcctgctctcagctttccttgatcacctatagttttttgtgtagggttaaggcctgaagggcttttccttgtctaccttggcatatccatagatgtcatctttgttcagctcacatctgggagatcatgttggcaagactttacaggcattggtcctaatgcttctaggagaagcaatttccctgatcctctggcacttacaattattaagccccctttttccataatgttccctgagctttgggtgcaggagtgctttgtggatgtatgctttgggactgagctctacaactctgcattttgattagtggtggttttctacagtggtctccatctgctgcaaagaaacatttccttgaggagaggtaagactatacttatctattggtataagaacaagtgtttccagattgttaggaattaatgctagtttagaaaattagtagttgtatattatcctccaacaaccatgacttcactaacccaggtagccaactaggttttcaaatcaggtatgatatccttcctgttgaacagacacaattaaagagctattggttaccaccaaggcataaaggccactactgcacccttagggttatcatgccaggcaaattgttgatgtggtaataggtattatagtcgggtaagactgttagttgcctaccttctttgggagcttgtgtgatgccttctggtaccattaaagcaaatcctcagagagacaacattcaggtcatttccagcttgggtttctgagctctgtttctgaagtgcatagtatctttagcaacagaaacttaccttctatctctggtgggtaaccaagggcaacaacaataggctgtgttttgggagtctcttggacagccctggccaacaatttaaaaggtggtctttgccccttgcagggaatatcaccagccccaatgaaaaagttcattaaaactatatatgtacatttatataaagaattacatgcattatggttatttaagtagatagataattatatgtatagcattttaagagtatgaatttttttaatataccagtggttctcagcctatgggccatgactcctttgggggttgcatatcagatgtcctgcatatcagatacttacattaaattcataacagtagcaaaattacaagtatgatgattcaacaaaataattttatggttgtgcgttatcacaacatgaggaactgtattaaaggatcacaccattaggaagattgagaaccatttcaacatacactgaagcaagatatgcagatatgttcacttagcaactttttattttgcctattgtctccaatgccaatatgtctctaaagaacctgtatcctttgtgtattagtcagggttctctagaggaacagaactgacagaataatatataatatatatatatatatatatatatatatatatatatatatagtgtgtgtgtgctatgggatttattatttatgtgtatttattatatatatatgggatttattagagtggcttacaggctatgatctagctagtccaacaatgactgtctactgatagaaagtccaagaatccagtaattgttcagcccacaaggcagttggtcttcagtactgctggaaccctgaagaaggtggctctaatactggtgaagaaatgaatttgccatagaaatcaaggacaagtaggcaaagagaaaaagcttccttcttccatgtcctttatataggcagccagtagaacgtatggcccagattaaagatggatctttctatttccaaagatctggattaaagataggtcttcctacttcaaatgattaagaaaaatctgaaagtagactgacaaaattggaaggaaaacttgcaaagagtgggaatgggagagtagccacagtggacaaagaacatagcattaccgaatagggccagtccaggcattgttgcttaccctgctgggaggagagcaaagatcccagagatgtgtatggtggcctggaactcccttgaaaacatatcattactgaatagggctggtcctcagcccccaaccagccagcagcatggaaccatggctgctgcagcacatgctattcacctgggaggaggggagtacagggcctcagcactgcccacaggctgcaagcacagtggtcatgcagtgagcctcaggtggcctggagcgcatgcatatctggatgctctgcctagctgagaggagtctaggcaatggtccagtatttatagcacttcggaaactagaaaccttgaaccagaccaatgacttgttgcagtgagtattgtatgtaaagctgtttgggaaaaatattactgtgtgacacactgcattttcgaatgccactgtgacgaacaagtatgcgaagaagaggtaggagaaatggagggatggaggggcacatgtgtgagggagaggcagaactagagacttgatggttgtgacgggtgagggagaaggctgcagtggatgggagagcatgtcattgcaaagggcaggatgctgtgcagcagcccggagctcatgcatgctctgctcccaaacacgtgattgccttggctccgatagcatgtccaagatgaagaatggcacattttctggatccggcctccttaaaagacctccatagtccgtgctgctccataggtcatgttggtgtccatggtccatgctacagctggggaacatgctgatatgctgccacaggttatgttgatgcccgtggtccatgtggacgcccaccatgttagtggaggccgtgttgttgcctgtggtctgtactacttcctcaggccatggtgatgtctgtgatctgtgctacctctggaggccatgctgatatctgtgggctgtgccgctgcccacagggtcatgttggcgtccgtggtccatgtcatcaccagaaaccatgtggaagtccatgatccatgctgccactgactgtagagggcaaggaagtttcttttgcaatgacaccgatgactgcagattcatagttaagaatgagagacatagaagggttctgtggcaacttcttcccccagcccctcctcccaagaaaaggaaacagtctagacaggaagccattgaaaaaaattctttaaaattgtgatagggttgttgaagcatagctcttcacagttgatggcttctggtggaggttgggggtgaaggactcagttttctttaaggggctggccactggaagctggaccatgttccaataagtatatgggcaacacaaatcagggtgtattatgtgaaatttccaaataatcaataaaaatattatgctggaaaaaaagaaaaatctctcacaggtacccaggccactggggttttagttccagatacagtcaagttaacaccaaaaatagccatcacatttagtaatacgctttaggtaaccatcagatactgtccaggaaattatgtcatacgaagacttcatgttcacttgcataagcatattacagtaaagcaatattctctcttcagaaaactgtctgctataataaacgtatatgtgaattttatcacatgtcatgtcctgttgtaaaatttgtttatttacaaacacaagatagatacagaacaatcttatattaataaacagcctctaaatttaagaagtctctaaaatataaaatggaagatgactaggtctagatcattcttactatctatagaactatagactccaacatttgcctttcttactaaacagaaaatagtttgcccatgatttttacaggagcataggaaaaaatgacaaatacatattagcattttgcaaactatttgtttgcaaactagtttctgagaggcagtaagcagcctggactctggcatgagggatgacaatgaactagatgatgccacttcctagttcctaagtatatcctaatcccttcctgtgattggccctccaccagcctggcctgggtcccagaaaatagaagacatgaatgttcaatttcttacctagactctaacgcaactaagagaaaaggaaaagtttcctctggtctactctcttccttgtcaactacttccatcctgctgactgctcacgtgggctttgacagggtttgtcagctgccagtcattctcaggaaatggaaatctcccctcttccttgcttccagagaaacaaggaagcttttgccaagacagctcaggcctctaggagcacagccggtacccattccttccttgcactgagagaaggaaaaggcctccagaaggctggcttcaagcagccttaaatggtattctgactgccacggttggaagacacatttgagagaaatcagaagcaagcagcagctaaggaagaatctgattgcttgacagcctggcctctttcattcattaatagctgtgattttcatgagagcactgtaccacagtcataatcttttccaggatgcctttagtgggctttcagttcttcccaagactcactcacactgacataacctgatgaggctgatttcattgctcaggtattttcccaagctgcctggccccttttcaaaaggacctcagcccaacatttctcaactctctaaccatgacaaagaagaccaatggcatatagcccatggccaaagtcagaaccagtgagtcccaccctgcatacgtgcaagaatatgcattggagaagtcaaacattcagctggttcctaatagccatttgaagtacagtgcactaaacctttcctctcctagtgaagagagtattttcaaatttgaatgcacaagaacataatatctgaaaaacatttttttaattttttaaacatttttatttattttagaagcacccttatttacatgtccatctccccattctcttgacctcccatgctccccaccgaccccacaacccattccccaccaactccccagggatagtgaggccctccttcttatcatatctgtgctgcaatagtatccctccacagggaatgggctcccaaagtccatttgtgccctagagataaacactggctccactgttagaggtcccatcaactgccttggcctcttagctggcacccatattcagaggtgccaatgctggtttcccagctttacaacttgggtctccgtgctctcactaggtcagctcaactgtttctgtgggtttctccagcacagtcttcactccttggctcctccctcctccctctccacaaccagattccaggagtatggctcagcgtttacctgtgggcgcctgtttcagctatgggaaaaggctcatgtttgtctttttgtgactgttactcaggatggtttcttctagttccatctttgaacaacttttaagccactgtgtagttggacttttctttgagccacctgctcacaaataacggcacagagacttactataaattatgcaaacttgccttaggttaggcttgtttctaactagttcttataatttaaattaacccatacattttaatctacattcttccacaaggctcgctacctcatctccatactgtccatcctgcttcctctatgactggcttgtgactctctgcatgcctagactcctcctcctcttcctttctctccacagaaatccagcctatcctctcctgcctagctattggctgttcaactttttattacaccaatcacagcaacacatcttcacatagtgtacaaataatctgcaacaccactgaaagttttcaatttttaaattattaggaattaagtgttttagatattagtaatgaaaaaagtacttgtggcataattcaaaactatacattagcaatgatttaattgtccaaaccaccctacaacccagagcacacttagacttcaaagatgtcagaacataactgagtccgttcttgctctctgggagcttaatagctctaggcttttgtggcctcatcttcagtcttttgcaaagcccactcttcccacagctgagtcccatagaatttagtcatgactttcctccacttactaagagctatatccatcacaggtaatgaaaggagtgggtaccaaatgaagaatctcgggggtggcactgccctgccgctgctagttgacgttcatggtccaagcaatgaacagggcactacctctccatcccctacagtttccagatggtaactgatgtcacactttaaatctcatcaactatgatctccatctatacttcctttgaaatgtagcatgcccaaaagaacacattataatacacatatagagcttgaaggataaaactgaataaccacaatactaaacatttctaacagagataaccaccacattgaatttttgtgagcatcgttcctctttttctttaagattttgttactaatattagaagcctaaacaaagttttgttggtttgctaggatttaggtggttttgaactttacataaatgaaatgatatcacatgacaaagaaacaacagaatatgaagagagtgttttgtcttgtttgttatgtgatggttgagataaaacctatagccacctgcatattaggcaagtgtccttccattgaaccacaccctcaacccaaaatttgtttttaagattattctaacttgctctctataaatgtaactaatttcttattactatagtactcctttatatgaatgtgtcctactttgtttgtaccattgaaatattcctagagcttgcttttatgaattattttgtgaccattcttggacctatatcctggtatacatgagcagaagttttctaagggttttcctcacagctataactaatgattcattaggacttacatatccgattgtattgtaaagtacatttcttcatatcctgcttcctctgagttttctactttattcagctcatttttcatatatccctgtgccaatatcaaactgtcttttttttttttttttggtttttccagacagggtttctccgtagctttggagactatcctggaactaactcttgtagaccaggctaatcttgaactcacagagatctgcctgtctctgcctcctgagtgctgggattaaaggtgtgagccaccaatacctggcaatatcaagatttcttaactaggcctaaggagacagatcagcagataaatgcatttactgatcctgcataggacctacgttcaattcccagcactcacattggaagacacacaaccacctgtaattccggctccaggaaatccaacacccacttctgccctgctcacagagataaacacacatacatataattttttaatgttaaataaactctattatcaaaacttcattaaatgccacagtaaaatgaggcatattcttcttttcttgtgggttttctatggtgctaaggattgagtccaaagtctccatgtggtaatcctgttatccatcactgagccactttatagccctttcagatggatttactcttcagaagccctttgcttacacccaactaaatcttagagtatgtgacctggttacacacatataccaatgtgtttctgcttactgccaccacgtgttcagatgtttgctgtaactaatatgaacctgtgggaaaatgggaaggggaccaaagttttccacctagtgtcataagacataagacatctttcctttcagttagaattaagtaaagtctaaatttctttatgaaaggcctgtacttcattcttatagactactgagtcctgtgtaatttcgtagttgttgtaaaacataaaactgaacttacacacaacttcttacggtatatggaatattattgactttggtatactaatttttaaacatatatggaatgctactgactttagtatattcatatatatatatatatatatatatatatatatatatatatatccataaaggcatttctattaagttttgaaactctagttgtgtaactattttatcttaaatagttactgtttgaagctggagagatgtcttggtagttaagaacactggttgctcttccagaggaccaggttcaattcctggcattaacatggtagctaatgaccatctgtaactccagttccagggaatctgacaccttcttccagcctccagaggaaccagacatgcacatgctacacagataagtgtgcaggcaaaacacccatccacataaaataaaatattaataatttttaaatgttatgacattttacttcttcatcatctctactatataatagtctactttttgtttgttagttggttggtttgatattttgtttctctccctcagtactctaaccggaccctccagtataatgttgaacagaaatagtgacaccctcctaaggtgatccaatcttctgcagtttccctcagtcacattaaggaagttccttctattcagtgtgttaaatttttttacaatggctgaaacatttcactaaccatagggcattgctaataccaattccaagaattaaaaggacataaaccaattgacctgcacaagtcatcttgccagaaaacacccaggttaaacccaacccaagcaaaccccagccggcatctcattgaagcaagctcatgcctctaaccccatggcctcaaactggaatcactttgtcttccagagctcagagaatcaggtaaagctgactcaagctgaagccacttttgtgcttagcttctgcccaatctgtgcttccttcacttgctgaccgaccttccctgaaaccctcaagaagtcacttatacaatactgtccatctcagcctctgcttccagggggcccagcctaagggacaaccagaaggcatgaaggaagaagtgtgcttgtaataaatattaaagtgtgtttgctctttaaatctaaaacatctccctctattatggtatctcttttcttgttttcttctattcttccctggactcaaccttcctgctccctcatgtcctcctcacccctcctcttctcccattctcattctcctagctccctcccccctccccccatgctcccaatttgctcaagagaccttgtccctttccccttctccaggggaccatgtatgtctctcttagggtcctccttgtttactagctttcctggcagtgtggattgtaggctggtaatcctttactctatgtctaaaatctgcatatgagtgagtacataccatgtttatctttttgtggttgggttacctccctcagaatggtttcttctagttccatccatttgcctgcaaatttcaagattccattgtttttttctgctgagtagtactccattgtgtaaatgtaccacattttctctatccattcttcagttgaggggcatctaggttgcagcttgacacccacaactaatcactgaactgaactggaatccagttgcagagaaggaggagtaatgagcaaagaggtgcaaatcaggctggtgaaacccacagaaacagctgacctgaacaacagggagctcttggtccccagactgatagctgggaaaccagcatgggtctggtccagaccccatgaatgtgggtgtcagtgaggagacctctgaaatctatggggcctcctgtagtagatcagtacttatccctagcataggtgtggactttgggaaccatttcacatagagagatactccctgagccaagacacacaggggtggacctaggctctatcccaaaggattcagcagactctaatgaccccccctatggaaggcctcgccctccctggggagtagaaagcgtagggttttagttggggggggggtggtaggggaggagaagagggagagggaactgggattgacatgtaaaacaatcttgtttctaaatcaaatttaaaaaaaaataatgggggaaaaagtagaatagatggactgccactagggcaattaagttagcttcataccacagtgtccacagttcaattattcatatgagttacagttatgtgctgtggtagcttgacctttacattatgcttgagtttgattagctgaccatttaattgccccttgttaggagcatctctgtcttgcatagaaaagacaaatgaggtaccacaacagagtgtagagaaggtcaggagagtagaagacatggctatatttcatgaaacaatgcatgaattacagttcagatatgtcatccccacagtgataataggcgaggagtagaaaacacattctttcaaatcccagcaacacccagtttgtttaagtctaattatatggatcctcagaatacctagtccactctaacaagggatgaccttggtctcttccatgatgatctaaatgtgcccatcactggtccacatatgcatggtgtcttgtgttttagaaatatctaaccacaagaaactgtacttctagtgaccatgcaaagtagggtttcattcttcaaattcatcagaatgcatgaatacaaactgaggtttcccttctttttaaaaagagtggaagttggtggtcaagttggtggtcaaggatttggggggaaagagtcctgagttaagatttcaaatgtgtcatcagttgagaagacacaagtaaattatttaacttctttaagctttgctttcttcatccattaaagtgaaagtagtgtttaggtgtactcacattacacaattaatgcttacccctgtcagcactgaatataatgtctggcacacatgaatattcaacaaatgtctatgcttatggtttcttttctaggcatgttgacattaagtaaaatacattcccattttatagagaaaagaaactgaaagctaaatgtgtgaagcagtgatggtaactgagttgatggtcactgactcggaactgaatctcgtaaagaaccattacactgggcctatacgtgaagttcccagcatgatgctatgcagtctacctaagctatagtaggaggaatcaatctcagttcaaaatgggaaatataaaagaaataacacagccttctctcctagacgtcaacttcaaatcaaagctcttacttagcaagttgataggaagggtcttagtggtcctgtggctgcttctccttctcaatgctaagagcatgggcatagagaggagggaatgtatccataataggtcatttttctacacactgcttaagagctgtcaccctcttgtccctatgattctctgagacccaactcctcaatcgctgatgcacagtccaatgacactattttgagagaatgtctctgaaattgtccacctaggtacaccttctggggccttcctctttctgtagcagaatctccactttcctaggacccaagcatttcttttacccttaccccaatccagacctagaaaatattcttttagtctatagcaagcattttatcatttcaggtcactcagcttccttctgagaatcactggctacttagcccaccattgttggacactttaaggcttccaatggcttggtctttgaaacaaaagccaggttgaatggagaaattcctttctcattttcaaccctgctcttgacttccttgaggaagccaagtgacaatatatgaaaggaaccggaaacaatttagcacaaattactctctcaaagtgcttgtagctacgccaccctaagcagttaattcaaggaggaaaaagctaccacatgtgtgagactaggccctcagtacccacatctgcctctctgtgggtagcagctttaactgtgctatacctgcccatcccagcaaggctgtggttcccaggcctcatgatgcagccagaagcttattaagagacaggcactgaacaacactgctttacttaatcttgttttctatttaaaaattaacattaacttaaaatggtcagtctgctattgatagataaatagatagatagatatagatatatagatatgtatatttaaaatttttgcttcatatatgtgtgacaaatttttaaagcaggttaactctgtttcacaagtgagaaaagcttggcccacttctcttgtgtaaaaatgcctatagcctttctcagctgggacaaagttatcactccttctcagaatagtcaggattccctcctggcgtcaactgtagtatttcattcactgatgactgaacaattggcctcttacccatcacaccagcaaacaaacattccatttacttccataggtttatgctttaaggagttgtgcactttttcccccaggttagtttacagcatatttaaagtgctaaaaatagttcattacactgatgtccatattcaccccaagttgtgaggcacatgagagcttttttttagcagtcacttgctctctgctctctgccagactagtgagaaacgtgaggagcccaactctgtggcattcttgaaaaccaggcctagcaggctttgaaggtgagcttggaaggactacaagggaatctaatattaaaactcagctggacaacactatggagttcctatagagttccttcaatatgggatgagattctttgtatttctggttacagaggcaagctccttccacctcaaacagcctagaagccttaagcaagcgtccacttctcctgtcaccagccaacctccccacagctccactgctgagagaactaaacccaagctgtgcatgaatataacaaattcctaaattcatttaaaaccatcctaaaatgacagatcccgccaagagagtccagaggccaaaagtcttgagaaacagaagagactttcagttccacgacagcaaacttagcccaaatcccaccttctcctgcggaccttgttctgaacaggacaacccaggtggctacatcaacccacatctttatcagctacactctaaaggacaagtccgctatgggtctttttagtgtggttctatggccaaagggtgacaaggaatggaatgcctacaaactgcctttagggctacaaatagaagtcaacacatattaacgctcttaaagctgtaaggaaaatatgctgaatagagttctgctcatattcaaaacatgttttctctcactgcatttcatacattgtggaatgaatgtcagtatccaattatgcctattactataaaataggcattcatcctcctgtggcctttctgcaaagtttaagtcactaatgcccctcttcagtcattagctgacccaggagaggcagaatcattgagtctgtaagtcttaaaagcaagccttcaacaaattctttccacttgtttgggcttatttactgatcaaaaaaaaatctaagtgtaatgttccacaaacccgctgacaccaacaccattcttcaagcacctggcttagcagtgggaaagagagtggcaggcaggaagactgaactgaagggagtgagccctggcctgttttcacttacgaaatcctctccccagcaggcagatggagaagcaggccagagtctccctccctcccggaggcatcaatctgcttgaatgaatgtgttacacttcagagtctgaacgccgagcttaaacacttgcactggggaagagaaaacgccatgtgtgtctggatatgtggtgcagagtgacagggaaaccaaggcatgtggttgacttgacagagcatatctggatgccataaatcaccactttgcatgtgttccttacaatagccttacagaggggaatgtgaacattgttatactattagaaccatctccccttccggagtatttttatacttagcttattgaattaattattcatttttcatgtcttttctttttgctgtttgctttatcatattccaaaactactgttatttatttgcatgtacccatgccaattgaaaaagataaaatttaccaaaggtctcctacaattagcaaattttagaacaaaatatgtatcaaattttaatatgtagcatgttatgtacatatatttactttttattttatgaactgcaggacaaaagcaggagaaatgaaaggtatgtctatttaaattaatagtaatagataatagctgaaaattgctttaatggaaaatataactatgtttgtgaagaaaatgacaaaagattattaagaaactttaaattttttaactaaatgaaaaatatgcaattacctcagtagaaataattaatatttaataataactggaattgtcaaaatgtcaaatttatgtgaaggtttactacagtgctaatttaaaatgccagtttgatttacctctttttaacagataaagtgactttaaagttctgaaagagtaggtgtgcaataacaactatgaataagaactaaaagtaagtttatgtttactgatggtggttaacaataacactacaaaaacataaaataattaagataatagcataagaaaaaaaacaatactgacaaaccaaaactcaccgactgttctaaatttttaaatcccaacataacgtatgaataaggaaggtggcaccatcagtccgtggtgaagcagctgaggccagcagagtcatcatttgtctgccatgtgctatatgcaaccttatgtacattttccctagagcttaacagttcctcacattgcctttcccagataactgctggaaaataccctttcctctcagaggcacccatgtgagactttcctcaaaagtgagaccgggctggagagagggctcagtggttaagagcactgacttcacttctggaggcccagagtttgattctcaggacccatgtaccagctcacaaccattctcggctccagtcccaggggatcccgtgccctcttctggcctctgtgggcaccaggcactcatgtcgtacatggacatacatgtgtgcaaggcacccatacacataaaacaaataaatatttttttaaaaagtaataaagctaccctaaccatgctgctggtccatggctctgggcataactgctggaaggttgcctggctctgggtcagtgaggcatgtgaagtcctcaatggtaactgctctaacaagctagaatggattctgttattggcagcttgatcattttaagaaaaaagttgtttataaccttacctcctgctatcatgttgaaataagtttcatgcccaccaaatctcatggcctctggagggagaagggttctaaagacaaaaaagcatgataagatgacagtaaatatatttgaacatttgatgctctttttctggggctgaggaagactgttcagatggtaagagaatgtcctctgtgaacatgaggacctgggttcaaatctgctcaacacccccatcaaaagatgggcataactgcacacacctataaccacatcaatgtaggacaaagacaggcagaggacagagtcaaagacaggcaggacagagacaggcagaggactaagacaagatgatcagagacagagaaaggcagaggacagagacaggcagaggactaagacaaagatgatcagagacagagaaaggcagaggacagagacaggcagaggactaagacaaagatgatcagagacagagacaggcagagggcagagacaggcagaggacagagtcaaagacaggcaagacagagacttgcagaggactgagacaaagatgagcagagacagagacaggcggagctcactagccagtagtctagcctaaatggcaagcttctactcactcaaagaccctgtctcaaggcactaagatagataatgatagaaaaagactctggtctctacatgcacattgcatctgctcctgaagacattcctgtgcatgcacactcacacacatacacataacacacacacacacacacacacacacacacacacacacacacacacgggttgttatatttctaactatctgttgggaggacattcaaagggctaataaatacatagttgtctgctcatttattttttacaaaggtcactcataagtagatatagtaaaaggatagttctacctatcaagttagcaaagatattattagtaataataagtcaattctaataacaattcatgcacttattcagtttacaggaacgtgtcaagatacaaattttctaaaaatatttcacaatgctataataacagtctttttaaataatactaatgctttggagtcttaactttttggaatctgtatgagaaaataaattatttatatttttctacagtgcttttataagcagagaaacatgggcattacaaaaggtctaagcaatgacttaattaaaataagtggctacaagaaaacctccctgcaaaattgctttaacccaatgccctccaccccacacatgtaaaactatatgttactggggaaacctaaaaggagtaggttggtctgccaggcaggagcacaccgaggccaggtaactccaccctgggacacaagagcagcagtagcctcgccctctctggaatcagaagaaagacgcagctggcagtgtgcatctactagactgtgcagctcggtacaaggggagaagctaggaaggctcctaaagtacttcagaaatgtcttccagcttcacagggaggcaggaactcaacacaaattgccaagcgataccataaggagataggagaagggaactgaggagagcctgagctatctgagtgttctattaaggactaggctgtgtatttccacacaaagctgatccaggacttcttttggaactaagagaccagggaacaaactagaattcaaaggtgaggactgtgtgcagtatggagccagcgccagccctagcaggcaggagagcaggcatctggagataccacagccagcccagctgggacattcagaagaagggaagagaggcatgaatattttctaaataaaaattgaagacacagactagtaattcccactgcgtttacagaaattgcatggcaggaacattttttattattattattatttttaattactcatatttacatattcatcccccccatggcagaaacatttaatgccaaaactatcccaaaacactgtccagtcatcagtaatcctgccacaactatctccatacttacaaaatgatgtccaaaaggacccatcttgtaggatagccaagtgctcagaggtgcagccttgggcctagcttagcctcaaacaaaactcaattaactagagagtatgagccaagtgtaacaaaagaagccagctctgacccataaacaggacaaaattctggatacagtgactgaacagtacagtgctggctagttttttccaacttgacacaatctagagtaatctgaggggagggagcctcagttaagaaaatgtctctataagactgagggtagacaagcctatggggcattttttaaattaatgattgatatgggaaggcccagcccattatatgtggtgctatccctgagcagatggttctggagtgtataagaaaacaaactgagcaagccaagaaaatcaggccactaaacatcactcctccatggcctctgcttcagttcctgccttgagttcctgccctgacttccctcaaaagtagagtgtgatctgaaagcgggaataaccctctcctccccaagttgcctttggtcatggtgatttatcacagcaatagaaagcaacctaagaaatgaatggtgaaatctagaagtccaaccccacatctgaactttattaacaatgttaatgcacttgcttcaacctggaagctacttagttcaggaatcaacacctgaaatcttagatcattctcgcatgactgctagtgacatattaattctgttctttatttatagctacctcatcaccttacttgtgacaaagacacctcagttagccaacttcaagatgcccaaagcatccccatcaggcaaaatgtactgaaccacatgcctcaaagatgcacactggggggacaggacagaaatgaggttgaccatggctacagagaggtagaccctgatgtctgaaactgctctctacaatgaagggtacatagtatccatcttttcaaacatacccatgaatggtaaatgatatcaatagtactgtcagggcctctgaacacatgaaggacagatacaaggagatttcttttacagtttgtttatttgtttaacttgttctgataattctaaaatttccaactttgaatctttgtacctacaagtacaaacagagcttatatgtaagtcttaacttttaatagtcactgtgcctatacttgtgaccaggaataagaaaaattccaagttcattttccagaaagggaaaacaagagatgaatgtcattctctcttgttttccaacaaatgcagcaatatgaatacaacccacccctgacccaggaggaatagtgatagaaaaaaagaacaatgaaaccaatacagattattttaaaacagagacagctgtgattcaaaataacaaaagttaccatgagaaaataaccaataatcatgttctttaggactatccaaaaaaagattataagtcttaaggtatactcaatgttcattattgagtttagtattcttggttaccatatgaaataaaatctaccctgtatctgcacagtaattttttattgtttaatggggaaattgcctcaggttgagccttttgatcttgcaaggcctggggaaagaatcccacagttgttctttttaggaaggcatagcagtggtacctgagaaagtttcaggaacaaccagtcatccagtcaataaccccatggctttgctaagtgaaggttcccaataacatctgatgagttggctttgccaagtaggactccccaacaatgtctagtgggtggacttgttaaacactaattgtcattgatgtgctgtttctcccttatgaataattcccattccaagaagatatggttaagacattttttgaaggaaatcggaaaacatgcaaggctggaatacaaagctctctcttgttagagctaccaccttcccccacagcactaccacaatcttagtaaacatttcccacttgctaccctgaggacccagactgatgacagggagactcctaagagcatataaaagctttggctatgatatagcccatcttcattttaaggcccctataggtatgaatattgtcttgccctggtctttactgcccatggtcatttcagatggtagaaactaactcatgggctcttggtcactattcagttttcttgcaagacctctctagtccgcaccagctaacaagtcaacaataattaaaacattccacccaagtcaaccaagactttctttaccactcagcagcaactccaacaattaaacccagaaatcttagcccaattcccaagactatcaaaataaagcaacaagagcattagcacccttacctccaccccaacctcatgcaaccaagagccaagtcatctgcaaactgtcagggaactgcacatgcctctaaccacaacatcccaagcaacttcccatctctcatcactccaagcactccacagaacaaggtatgtacttcagtttcccttcttagcactggtatttgttattagaacaagaaccctacttattgtaagctgagaccataaactcgtctggttttgagatttttcatgacttgtagccaaaaacacaccagttacctggccctgaatgactgctgtctagctggttcacatatatgcacatcattctttgatcatccctttggtcccattcattctgttcttctgtgcatccttctgtgccacagaagatggcttcattgatcccttcactgattcctttgtgttgggttcgagcagcagaaaaggaaggaacacacagaaagacaagacaacaagaggccagggcattaactttatatacatatgcaccccacaaatggctaagcaatctgttcccatcaagtctccattctcatgggattcaaggaacattatcttttccctagactctccaaacctgagtagtggtgactcctacatgtccctagtccctgagtactccaccattccttggtgactctcttagttttgttcatattttccaaggtgtctcttcatcatttcatggattatatgacttgatcctgtttcctcaaaggtcccaagcacctatcaaccactaggttcttcctggtgttctacatctgtcctaaattccccatcccttacctaagcctctactgccccatggaaagggcaataccagccttggcttccaccaaaaatttcaactatgtatataccataaacacggtatctattctatcaggaacactgcatagcctcaacacatgagtaagagttccctgacttgtctaccagttctgagccattctgtcctgtagctgtcaaagtgtatacaacacattcacgctacttctgatcctcctgtgctcaccatcagtatggtaccccattagaaactcttctctttgaagtgatgctcagatgtatcctaaataccaggtttcaagtaccagccaagatctggagcatcctctcctgctactctatgttgtaactgtcctggctagcatgtagatacgtccaaacactgccatgaggcataaggagatggacatctttaacaatgcccactgagtaacagcttcaaattctgtcagtgaccatgtagcaaactgagctatatttggacatcacttgaagaaccctcgtagccttgggtggtgttggaagttactttagaatactatgttctttgcatttaaaaacttcctcatcgtacaatagaagtctacatgactaactctgcagcatgccccctcccccagcccagtgcatgacctctgtctaagaggtcccactccactttggcaccaccggattccagacaccaagcaaaccgggcttctccttcccacgagcctgcctccttttgatccaaaacaccactccctttcccttgaaaaagcctcccagctcttcctcaccagagcactagctccctgctgaataaataattcttacatcttcctccaatactcttcctctttttctcttgatgctttcacttacgcactgatgtcaaagagaaggtggactggggagggctccagccaggggaaagaaggatgcattatctcactggcattttctaatagggtcttttttaaaaaaaaaaaaatctttgagggaagagacacaagctggaacaaatttctttcaagcccgtttagcctttcttgtgctttttccattatcatttttatagcggagatttcagtgaggattcacagtgagtcattttatgaggcaactccatctgtaccatctgcaggcatgactttcccatcactctagacattacgtatctccttatggcagcccggacagggggtggagattgccaagccaggtcacatgccaggagtccatcactcatccggaggggatgggcagggtctgcttacaattaggttcaactcctggttctggataatatgtcgctctggctgcaaattccttcttgccagctccctgctgggcccaggaggagtcaaggcactgccttcttggtttctttccttctttttcccccctcttgctctccaatgctcccctctatctgttctctttccatgattccatctttatctcccatgtacccttctccatttctttctcctcccttgtctttcttttgcactacttctccagtgcttctctcacacttgccttctttcttcatgtctcttgtctttcctgctggaatgatcatctctctgtctctgctccttacaaagaaatttttcatgtcatgctaacagagaatacagctgtttctcacaatgtaatccaaaaaccaaggcagaagtgagataaaggagagaaactcacactgaaaatgttttgagactaattgggcttatatgtgatgctaattactagtaaaaaatgatctgacgccctgagggggaatgggtaaaaatgtcatttgtaatataaggatcacagaggtcgccatgtaatgacaaagtaggactcctctggtcagtcatttcaaatctgtcactaatagagccccaaattttaagctaagataattatttcatgccaattctcctataccctattccattcatttatagggaaatatgactgagaaccaaattgtgattatagttttaccccgaaattcatctgtttgcataatttgaatcttacttacaagagatacataaataaaaccttccaaactgtcaacactgttgattccacttaagggactcccaacactggacaagggtctgacttttagtcaaactgccatcaattaagcagatgaatctatttcatgactttgtgacaagaggggagtgatgaaataaactatataaattttctatccacatctctggatgcttttcttagtaataactaacaaaatggctaatttatggcagggcgatggctttgggcatcactgaagttctagctagaggagaaagcccttcaacagacctgcctgaggaggccctgtggtgtgtgttctgatgagcattttccagctgaggacaccaacacttggttgtgagcttccatgtagcatgcaattcaccaaaataggggtctgaacacgcattgacttggatctagcttcttgagaatttctggtaccaactgtgttagtacctctgtgacgtctaaaaaaaatctgcctgacctttagctttgctatggtgtcacaaaatcataaaaatgattttgtggaaaatgttcatcagaacacacaccacagggcctcctcaggcaggtctgttgaagggctttctcctctagacagaacttcagtgatgcccaaagccatcatcctgtcataagttagccattttgttggttattactaagaaaagcatccacagatgtggatagaaaattcatatagtttatttcatcactccactcttagaactgtcattcatatcaggtatgacagcaaatgtttatttagtcaggttctgtgctgtttcctttgaattatctcattttgtctcataatgaccttttgacgttcctttttcaagaaaccatggctcgcagacactatgtaacttgcttgttgtctcacaaatagtccatggcacagctgggaatttaaaacaagtcttatagaaccacagcccatcctctgatccccaaactacagtagagcaggggtgcaagcagccaacaaggaagtcaagagaataatcccaagatctatttttattataatggggattactaaacttcatcacagggttaactagtaaacaggtgaacattttcatatgtgcaggtgatgtagagagatgttgctctgtctagccttgttccattaaaacaatgtttctgccccaaaccttactccatcacaagagctgagcattgactctgaaatagttatacaaaacaatttaaatggagctctcattatgagccatgcctctctgacctgcagcttttaaatgttggaatatgcctaggctaagagatgaagattgaagcaaaataagaataccttttacatggataatatttttactttccaaaaaaataaatagtatcaaaaatgctaaacagtcctgaaataagtaattgtttaaacagtacttagtccagaaatcactttgccaaagtgcaggcattgtatatgctagtatccaccagccaaatattccaccccagaaagatttaaggatgggggtaataacggcacttctgacggcatatcagtgggaagaatgtatacattaattcatggaaaaataggaagtgaatgtttgcactaatttgtggaaaaataagaagtgaatatatacattaattaataggaactaagaagtatgattggtggcagagaaaaataagaagactgcttttttctatgtgctaatgttttctatacatttttatctatatacttagatcatcttaactaccgatggggtttaacttgaaatctgctgcctagaaagagaaataggacttaaaatttgtgcagtatgcttgtctccaccacaggtggttcatgacaaccaacaacgtgtggtgtcactggttccagcatttgctgactcacctgctagctccctggggggtaaaggtgtcactgcactgttgttcctgcctcttctcccttgggaacttcctagtgacccactgaatgagttttcccttccctgtgcttcacagactcaggggttgacccaaatcaggaaacaggcacacagagcatgaaccctccaaacacagaaagcatggctcctcccatcttttctccagggttcaggtggaaccatttctaatgtgacagatacagggcttagatgacagtgaggaacctggaagggctgatagccagagaaaatagaactctcctcaggtgcctcagccagtggatgggagagcagcattctggagcccaagggcacataaccctgacaaagtctttaatccctctcatctccattttcttatctgtaaaattacaggcttccactagatggtctctttctaagcccagtaattttaaatattcactagattaagcaaagctaaactgctttgtcctctgactaaaccatgatttactctaagagggagaaaaaagcagctccttgtttaaaaaaaaaaagattaagaaaaataaactgcccccccatcaacacctgaggcaggcatgagagctggccctgaggtcataagagcaggagagctgccctccccccccaccagctacaacagttgggagagcaggccctgcaccttgcctgagcactacaatagagcccacctcagtatctggcctaatatccttgtggctctcagatgagcccttttggaatgtattaacttaggaactagttaagaactaaacatgtcatctgaaacctacagcagggggctccctactttgctgtaacccacctccctgatgtttctaccaatatatttgagaggcttcttgatttctgactttccttattctgtattgtttttaactttcaggaaacagcaggccataatatgggtgagttacatctttgattacagtctacggtcactcaagtttggctactgaataaaccaactcctaatccttttgaggcaggaaaagcttgtgtcagtatgaatacaagcccattaattcagagaaggaggatgtataaaagagatgaaggtatctacattgattacagcaaattcaggaaagcaaaggtttcacagttgaaagtgagccaagagtttaccaaccgaggcagccatattctttctataactcatttcctgtgtgtgctcgcatgagtttatgggcaccatgtgcacgcaggagcctgtggaggtcagaagtcactaaatccctggactgggaaccagattacaagagtaagtctgcttagccactgagccatctctccagctcctctacagtattctttaaaatctctattgggcacatttaggttatttccaatttgtctttgtcaaatgtgtatgcacatagatttatatggcattacattccagaaagatgcagacaaaatgtaacacagtatgagaaacatctttgaacatgcataccttcataaacatgtttttcttttaaatattacaagatattacaaattctgaatctccccatatcttgaagcttctgatatttgtccccaaactgcagatcattttttgcaggggagggaaaagcaacatgcaagatgcctaggacaggatgctagaggacatgcaaatcccagctgccaaggagccaatgggaaacaaattggagcacttttgaaagcactaaggtgattattgctcagtgcccagagatctttcagcaattcgcttaaaatattccttcttgtcagacccataatcaccttttcaaaattgtgccgtggagagtcatgggcatgcatttggtgtgaggggcataaatctttctaatccacactgcaacctgcaatcttccttcccaaaggagaggctgttctaggctgcccagaacggctgaaaagcacatgtctgctccccaaaactcacatcctctcctgcacctttcccccaactttccagccttgtttgtacatttttccttgataaagcctttctaagccaaagcacttacctatgcaaatctaactttcataatgttatgcgaacctcacctgaaacacgaaagaacagatgcacttaatggaagctaagtgccatgtcaggatggccatagcagtaaggacttagtgacgagtgttttgctcctccattgaaaagcttcatgcatgtatggcaactggatagaaaaggtcattccagtcgggtgaaatggctcaacaggtaaatatgcctgccaccaagactgataacgtgagttcaatcctcaggaccccgagtggtcaaagaacagacacttacaagttgtcctctgactagtacctgcacaccttgcatgccctaggggaaaaaaacaagctcctgtgcgtgcaaacagcctcccaagtcataggctaagggttttggcttctccaaaactgctgagagccatttgtgtttccggggacttgggctgaccacacatacgccaccacatgaaggcttgcctgacctgactagtctgtagatagcacttgctacccttgaaatagctgacctcttatgtccgttagagcataaattcctaaagacagtcttcagaacccaactgcaacaactggtacacaatagtcacaaagacagccaggccccagtggcaaaagcagcaatcatgtggcatgctacctgccattgaattcttctttgtaaatagagctgtgaatggtttatgttgaatctgaatatgtttatggcactagtgttgtttctcattttacaggtgtttatcctaaggctcaaagaaatgtcaccgattactcaggtctcccagttaggaagtggcagacctgggcttggttccagatcaaactttgaagcacctgctggaaacttctacagcagccacacagctgcctgatcactcccagccaaccgctatggcatactttaaacaggaaaccaaaatattcacaactgattctcacgaggcagtcttccttcccaatgacagttgacctaggtcctgtctcaacatactatatcacatagactatattgcttgaatgctagccccaaacccaaacagccatgcaaatggcccagagcaaagcactgctaccctttcatccacaccatttcctccttcagctctcaccacaaaaccatcacccacatcaaccaagcacgaaactaaagcctgtatttatctaacccttcttcctcaacgccatgctgtcaactgaatcctgtctttgctccttcaaagtcattcattacctccttatttcctgtccccactccagcaaccaagctcccagtcccctaatctatcttcccaagtaggcctctagagatttctaccatttcacactctcccctggtgctaacttcacagcatatttcttctggataacaagacccctgcaactgttcccactccatacttccatcccccttaaaaataactgtgtgtaataggagagaatttccacaatgctgttctgggagctgtggacagtcccctgagagtgcttgtgctccatattattcttctcaccaagaaaacccatgccagagatccccaccaatccaactcagtcactattgaagttctcataatcattgcctgaatatttctgtaatcagcacctttggtctcttcaacttcctcatacacaaatttcactccaaatactggtcttgcctcccaactagattctatagttcatattattctcaactataattatggccaattatactgtttttcttaattatataagttttacattatcatactcacagataaccaattatatagggctagtcactgccctcattcctaaattaattatgataaagtcaagagatttttcccgactcaagaagcttgattttgtatgaccttgtaagaatcatctcttggccactggttgatgataatcttaagtaaacaagttgggagatacagtcactaaaaaatccatgccaaacacctagcactgtattttgagaagcatagagactagataatgaactaagttccaaggaagcctgtagttccaggaaagcctgtactgactgaggcagatcttaagtgcactctacaaattgtgtaccacatggtcaagctactggcaaccaccaggagtggcataaaactaaggaaagaatatataagcaattacaggttagaaaccattaaaggagtcagtaccttcaaaagcctgtcccatagaagggccactttagcaaagaccagggtacactccagcttcctttgtgcagaggaaacacgcaaaacccccagtgtagatgaagcatgcatgctcagtgttaaatgcctaatcagaaatgcttcagagatgcgtccaccttcaatagaaaatgcagtgagagccagatgtaggagtataggcttgtaatcccaacactagggaatagcaacacgagggtcaagagttcagggtcatccttggctacatgtgagttcaaggtcatcttaggctacatgagagtacacatcatagcaacaacaacaaaaaaaaaacagcaaggaaaaggaagctgaagtgagatagtccatgagagtctcccactctcctcctcttctccagcattgcatcatgtactgagaaaacagcgatcctggactcctcttgcctcctacaaacaagagtgcctttaggtccaatgcacacaagccatacttcttattttctgaaccagccactgtgagctctctctacaataggaaatgcaaatacttaaagcaggaaggcaagtagctaactgtctgaaccaaactgagaggaaaaagggcattggaagaagaggatccagtacagaaacatgtccagagattgcttggctctttaatctctagttatttttaaatggtgtgtcaggaaagctgaaacaactcattttcaacccctgatgcatagcccagatgatatcaccgaagaagtctgctttactttgctgtttgctatgactacaggtcatagtgctgagtagtatggacttcgagtctgaaagactgtgttcattaagagctaagagtggctttcctatcagccatttgccgtggtctctactaaggcccctttgaactcttagaactctactgggacttctttaaccttctgtatccattctgtaacctacatatatatatagtctaattattgttggttcctgttatgtagtctaaaagctcatgcagaagaatttgctcttgttggtgggcagctatcaagaggaatcaggactactgggtcaactggagccaatgaaatggacacagcttgtagatttattgttatccaattaattgtggcatctcagaaaagcacaaacatgtctgtttctgaactggtgtgctcataaaattattttttaaaagcctataggtaggtacccaagtagttctactcaattttttaattggccagtttttagatttaaatcagaaatgaataagatttcaattttgatgaacaaaaagcagctttgagtcattagagactttcatctttctgtctctgtactttgatgaaacttcttatagttgcagctttccgagacatccagccattccttgactctgtgccctgtaccatctgggagatatacgttagtgtgctagtggaatgaatggtcatcattgggactacccaaatcattcagtgaactgtgctccatcttgtactaccaagccccacgcttaaaggtagggacttcagaagtgttttttgcaattgggagcacgttgccagttgtatgagtcaccctggatagccagtgtgtgctctgcctgccagaacacccatctcccttcaccctccctactcaagcccagaaaacacccttgataattggagcacacgatgggaagaagaggaatgactctcctgaccctacaagccatctgttcacacctggcagctcatgctttgattatccccaactcaggttggataactacagatgtctctaattttcacaaagtaaaggagtccttgtctggaataaatgagatagataaattagatggggaagggaaggagtcaaaggtgtctccccctacttttcatctgtggcaatccgggtgctctaatctattgtacaaatgtctgcacacagcatgccaacacttgcttgtaaactcacaggagaaatctcacctggagacaatgaataatgtctgtttcatgcctcttgcccctaatatactttttgttttgaaggcatcatatggattaagttagtaacacccatcctcacgttttcaagccactatctccccctaaatcatccctctttggaacttgacaggtgatcacaccttgtctcatttcatgccgctgcttcccatgagcagattagtcttgcttcacaaatcacaggctcttttcctgagcgaaacaccttccaaattatggggacctttcctccagggcatcaaagttctgctttctgacgactgtggtgttccatggaggggcttcattgttctaaaacactgcatcttgcttcatcgacttggctgacggtattatcataaaaactcctgaagaggcttttgccaagcccatgataacttcatctccacatttaacagggtatcttctgggcaaagctccaggtggcctcagcctgtgagccttccgaggggcaaaactttacctggagctgttctcctaagtctaaggtgcagggagaagggaaacagattgtcagcgttgtgccaatgtagtttacaaagctaaaccacaactgcttgtgatttgccagctcattccaaaccagtcagaccaaatacagccagatgtggcagttttgtgtaaacagacaccacagatgggtcaaggaatgtacacccctctcttcctcctaccaaacgcctcatgcttgcactgtccttttgtttcttctgtctccctacatagccattcttttgtcgcctgacagagtactatttcccagagaaccacagtctagctgatcaattttggtaaaccaatccccaggtccctgcactccagatgaacatttgacaaggcctggacagtaagaccattccttcactcaggccacagggatagtatatgtggcctagatctgagcatttcttcaagaattataaggaaagagacatattcgttacacaaaacttctaagccaataaaatgtaagcctgaatctacttgtgagtaattttgtcaccaaagaccagggaaagagtcttgtgagaagagcacccttgaagaaagcattatcaacagtgagaggccaaccaggtgtggtggcatgtgcctgtaatcctagcacttaagagggagaagcaaaaataatgggagttcaaggtcatccccagctaagaagatgccataggctggcctgagcaatgtgagaccttccaaacaaccaaaaagtgagacatggagtgtgtgcagccattgaaacatgtgaagcaatacatgtgctttctgggtcaagaccattttatctaggtttctatctgagtacaaggtctgctaaatgcccagtggtggggaggaagtcagacttgtcagctgtctcacatgagacatgtgctggctcactgttaaagcacatgtccaacacctatgctagaccctatgtttgatgtgggacacaacctttaccctaatgtttactacctaaaatccaatttgaacagttttgggagttccaagggtatcaaggattattgagttcatttttactaagaaatgaaagtgcatggatttgtacaaagacccaggatcattacataattcacacctatgtgcttcagtccctgatacagagcttacttccattacatacattgatgaaaactactaaattcacgcctaagaaatcctagagaaaggaacatggtagccacatttatttattcatacacagaatctgttttggggaactcctaccaatattgatacaaggttaatgagtataggaagcctgctctgagctctaggcaggcccattcagtgggttactccttctcagcccccttttgtagttcttcccttcatgttcatgcctctagactcttctgttttccttctacactcactcctaaactgatctcagccagccttatagctgtccagcacaggcctgtccttggtgccccaactgcttacttgtatgtcccatttactactcctgatacctccatttgacctcacccaaacatgtccaagccaggctcccaatctcctcgaccctagattagctccttcctgcaatctttttcatcgtagaaagatattcaggccagaagactcaggggtcatcattgactaatctctttccctcagccccataatgctactactacccaattctgatagctgttccttcataagccaaaactattccttcctcttggcagcattgagatcactggtgctcaagcctaaataacgcccgcacctggaaaaccacagcagctttgttacctgctctgtgtagtctctatagaacagttaaagcactccttgtaaaatgcaacttaagaggccagagacatgctccatggttaagaagctgctgttgcagagaggacctggcttcagaggtctttatgatggcacagaattttgtcttaactgttcactgttgggatcccagaaactacaacagtagttccactcaaatggcaaatgagtgaaagagaaaatatatatggttccttttgggagggagtctagtaacagaaaactgttggcatgggagaccaaggcttgcaagaaacctaaggggttagcagctgcctctgaagtctgagctgtcctcctgtttgcactcaggcgcaggtcttctgattttccttcaagtctatgcactacgcagatctaggtttcccgtttttataccagacagggtcactctcacaaagattacccaatggttagaagaattgactatctaggaaagatcttctagcaccactgctatgacaatgctgagacactgagatgtctacaccttcagtgtcctcatccagatgaaaggctccagatgataacactgagttctttacgataaattcaccaaaaccagcgacaacaaacggcttctccctgtgacttcctgaggtgaacctcatgctgcttatgttaaagtaacaagatcttatccatttagcaaaaacattctttctttagaaaggaaagatgtccatctccatttctctttcttttctcttcagatagcatctggcattgagtcttccatggtaatttaaactcaatatggtggggtacagcgcactggtactgtcccttacttccttaatgtaaaaaattaactcagaataaaccataatagctaaaacagattcttgaaaatactacaaaatctttgtggttttaggtcaggcaaatatttcttagctaggcatataaagcataaactgttcaagaaaacattataacttgactgcaaaatacaaccccctgcaaagactcatgtttagaagacttagttccaaagtgatagtgctattttagaaagttctagaaactagaaggaagctgaaacaagcaagtccttgggaatatgtgcttgaggtctgtatcttgagtcttggtaaatattcatctatttgtctcattttctatgtcctctctctctctctctctctctctctctctctctctctctctcctctctctctccctctctctccctctctttctatttctctctttctctgtctccctctctctctattttcctctctctctctctctctctctctctctctctctctctgtgtgtgtgtgtgtgtgtgtgttctttcctccctccttcctgtcagctaccattatgtactgaacaccccaaagtgtaagccaaaattaataccttcttttaaaaaaaaattggaaagaaagaaaagctctttgtccagaggtctgtaagacaacaaatgaaagggaagtaaagagaaaatttctgtgggataatctttctttacattgtgactatgaatgaattacactcattggttaataaagaagctgattgacctatagcaaggagagataaagttaggcagaacaatcaaactgaagatgcttgaatgaggaagggcagagttaggagtcacaagctgatgaagagggagcaggagatgaatgtgccagggtaataaaggtaccaccatgtggcagagcataaataaggaatataggtttacttaaaatgtaagagctagttagtaataagcctgcactatcgactgaacatttacaattaatatcatgtctttggctaattttgaagtagctcctaggagagaaaaactctgcctaaagaaaatgccttcacattgggcagtggtggtgcatgcctttaagtccaacactcaggaggcagaggcagtcagatctcagtgagttcaagtccagctagtctaagagtaagttccaggacagccaaggttattacacagagaaactatgtctcaaaaccccagagaaacaggggggaaaaagaaaagaaaagaaaatttaagagctacaaggggtgtctaaaaactgtgagcccctttgaaatttcccagctgtcaccaggaagtcacaagaagtgaaatgagacctttctctttggaaattcttggtcctggaaagaaccaggcacaggagaggacagcaagtgcacaaggagaagagggtaaccaagtgccactcagaaagtcaccagggtactcattaagaagaggcccccattcctgacacccagcccaaacctctcaggtgacacccagggaggagcactgagcaagtcccctcatcagtctgctgtctgcttgagtccaagagccactggagggatgaagggggctgcttgaagcccctggaggattcagttgacctctacttgagtgactacagctgactaataaagtataactgaggagggagagagaaatgcaatctgtcagcagcattactaggtttgcagtgtgctttctgttgtgaagacacaatgtccatcctatgctggtaacacaggctacaccaaacactataaaataccatcatcaccaaacaccatcatccagttgtgagataatacaggagaatctctgtgtggacacttacttgaggcttaaatcatctttcccacaacaaaactttcctcagtagacacctcatctacccaatcagcactgagcttagatgtccagattttaagaagacagtgtgttaatggggaatctatttgataggtgcttggactttcttccctttacagtggggctttcctaccaggatcaatcattctcctgacttcattagctacctgtagtatctcaccttgctgggggcatgttaggcccagccaacctgagatggggagcacgcattgaggaaaagaataggcaagagacaagagatagagttggggtggcacctggtgaataccaggatcaccccaagtttattgttcaaagtctttttacacccccgtcaaaagagggggagagagcaaaagacttcctttccaaagatacagagaacaaacaagtgcaattaccttctcaatacccaaaacatcaagtaaccatattctgaattagtgttctgttgtttaggcaggacatgtagcgactaccaggccgaacatgctgttgcatttacatcttaggccagacctcatgttgtcaaggtaagacatacaatagccacaccttaggccaaacctctattgtttcaccttggaagaccaaggggaggtaaaaactcggtggctttaagtcaaaatgaagcagagccatgttcatgggctcctgcaatgcctctttttctgaacacctcaaaggcaccccaccccatgccatcatttgtgggtcatctcccacaaatgtcccatcacctcctctcacgtccctgggtcttctcttcaaggccacatcagctaagatctgacctcctctccaacaagaagttcagtgacagcacaggggtgtgaggacattatccatttccaggtatgtccttctaccccaccctacatagcccatgaattctaccttcttagttttaaaatggccaaccacactgggcatcatacctacaaaaaaaaaacaaaaaacaaaaaggaagagagaaaggatacaggcagaagtcttcagatgctgacattttaaaaaaaaatgtgtctgggtgttttgcctggaaatatgtctatgtatcatgtgcatgcctagttccacagaggctgtaactggagttacagaaggtaacttgaagtggcacccaggtcctctggaagaacaaacagtgctcttaacttctgagccatctttccaggctcagtctgactttttatcttgaggagcaaaaggtaaaataataataataataataataatccatcgctggaaaacccttccttgttggacacgctctatgcaagctgtgtgtgaactctaggaattctcaccaacacaaacagttccagagcacagtcggcctctgaaagctatcctggagacttcctaaggtctaaaaggtggctcaacagtgttgctcagtctaaatactgagtgaggtcataaatacaagttggaagtcctaaaaccagtgaacagttattaaatggactctgaatagagagaaggccacgaaaggtaccactgagatgtgaaaaaataattgagcatcataggaaagtagtagaaagatctgggtgtaaatcccagcccatgatagtagccaagatgccaatcccctgtctcctctgcaaagctgaaggagcagtggcaaggtggcacaacacggaattgcccttcctggtgtttacccaaaggaattgaaaacaaactctgttatgataaatctttccgccaaaagccagtcaagccctaccaccacatgggcactttcggccagctgcctgagttctgcccaccaagttagggccccaaaaaatacacagagacttatattaggtacaaatgctgcttggccaatgactaggatttctcatctgttagctcagtgttaattataataaatctatacataaggcttatcttatttaggatgccttccattggtgtcctcatcccggggtcacatggtgaccctggaggaagagaaaggggaccacttccttcttgcccttatttatatatagtctccctgccatgtcacttcctgtggatcaccacttctttactacatttcccagaatcctccttgactcctagtcccgcctaacttgctgcctcattggccaaacagtactttatcatccaataagacaaacacatacacagaagcacttcccccatcaaaacccagacaaaaataaatgggcaaacatttatagcaactttattcatgactgtcaaaatctagacacaaccaagatgtccttcagtaagtaaatggatgaactgtggaatgcatttcagtgtcaaaaataaatgagctttgtgtcagccaatgacacggaagtaaatgaatactactgtgaaagaaaataatctgtacactaatttgtgtagcattctggaaagggagagaccatggagacacttaaaaaaatattaagatgatcagggattagaggagagaggggataaattgtaggaaaatgaggatttttgaatagaagtaaaactatttcaaatgacactgtaaatagtggacctgtgtcgtcatgcagtgtccaatccaaaagagaaccctatgataactacagatgctgagagagagtgacatgtcagtgtgggtccatcagtgaagaaaattcacttcctctggtggatgacactgtaatggaggaggctgaaaatgctgggaagggagctgttgccaaaattccttccctgggggagacctaagcaatatctagtcctcctctgaagatcccattgactgaggtttgagtctacctgtttactcttggaaacaatgagtttattaggcttgacttacagcaagaatggaagagggatgtgggaagaatgctggctgcctcaaagtagccacactggaagatccgtatccagaatagctgtcccccactccctctctcctttcccacctttgtactctatcccagccctcaggccatgcacaaattgggtagaactatatacagctggtagagagtggtgactggatactaaggtgaggacctcagggccctccatgctcctccttctctggagggaatgtcaaccatcagagagccagctacggtaatctctcacaagagggcacagttaactcttgaagacagtggcatcttcgctcagaggacagtcctatataccaggtgcctgtggaaaagctctgtggcttcccctcaactatgctatagaccaagaacttctaaaaagtagtcttgaaagaataagtgaggcagaaagcctcaaaaaagcaggtggttcactgcctggcagttgatctgctcttcaagaaatatttgtgtctccctctgcagtttttgcttctaaatttgctctaacctactccgtgaaaataactgcttctcaagtcaattcccacttaattattttaagcctgagaaccagcctttctccactgaaattaattgaagattcatcaatgatatggttcttccttcatctaagcatttcatcctagatattgtagaactcccttaaagtcacttcctctgaaattaagtttgctgtcttcaaaccttgactcccctattgctgttgttcaacccagcttgaaacagattcatttgattttctatcagattaggtgctgatcctgctggggtttgtttctggggtttgtttgtttcccctcctatttgtggattcattttcttcagccagggcctgacagtcacttccttgatctcacaactaaagtgctacataatcttcctgtctttctctttttgatgcccgagtcacacaatgtcttagttagggtttctattgctgtgaagacaccatgaccctagcaactcttataaaggaaaacatttaattggggtggctcccttacagctcagagctttagtccattatcaccaaggtggaacatggcagcatgcaagcagacatggtgctggagaagaaggtgagagtccttcatcttgcaggtaacaggaagtagtctgattatcacactgagtgaaacttgagcatatatgagacctcaaagaccacccttacagtgacacacttcctccaacaaggctatacatacttcaacaaagccacacctccaaatagtgccactccctttgtgggccattttccttcaaaccaccacacacagcttctgtttctggctttgagcctcacaaggcatccatcctttatcctcttttgcacccatggagtgtagaaccaaagggccctgtgacgtccctaactaccagcatcacgactcagcacttggaggtcagcatatattgctactgggatccatgtttatatgaacactgtggtgcctttcatttgtccgatagaatatcaaaagtttgttcattagtccaaaattgtacctccctgaaatgctttcttttaaaataagtgaaaacctcagataaatttgataatttatatgaaattgaaatagaaaagaaaaatctctttgaaacttcatgggtaaaaatatgtttgaaacttatagttttagcatcctagaactatggtttcaaatgtattttatgtcatcctaataacttactttccttggtaaaaatatctcaagctcatggatgagccaagataatcaatatctcatttctctttaagcagcttaacaaatcattttattagcctcttcctaagatcatgtttctctagtctttttaattgtatttatcattgtattatggtgcgcgtatgcatccctacatcatggtgcaagtgtaaaggtcataggacaactttgaggagttagttcttttatcccaccatgtgggttccaagggtggaactcaagtgtttgtacacctgtgcctttatctgctgctgagacatctcacagacccccagttgttttttaagtgtgtgtgtgcacacgtttctaatgggccttgcatagaggtctcttttttatcactgaaaatatcatgttctcccccaaatcaaagcctcacttgctcacctccattcccttcttgatcctgcctgaccaatcttgtcatctatgtcatgcaatgttggagagaaaaataagatgtttggggaagttttcactgtaaacaccatgcttcaagggaagcatgggaaccagttaatgtctatccataaacacccagcctgtgattacaacagaggtcatagctgtaaacagtttatagtcaattgcctgatggacagtcatggaaatgaaggtattttgagctctccttatgcctctgtgctcactaccctcctccatcgacagcaggaaaaagccttttcagctggccacttgttcacaaatgtttctaattcagctaaacatcttgataggaaatatcataaattatatgtataggcctgtcagtgcaattttcaacagcagtaacatgagttcagttggaaataaaatgaaaacttcagaccaatttccagactcactaccttggattttaatccaaagcacattaatgtcaacaaagaagaatgtctgggcattcttggattaaaaccataaactaggaaatatatttaagatgcattaagcctattttttaccctcttctgggagtttccaaaatatcctggaaagcaggaatatgttccagtaggtggaaagcccgcctcaagacctgcaacactgttggagtaaatgccactatactacttacatttgcgcgtgacttccattacagggtcctgggagagttcccataccacaccataggaaaggggccaccagcacacagtactgcccatagtagatgctggctatacaagaagagaaatgaggaaagaagtgaatttgaatttctctctttcggtgtgggtgcagacatgtggggtcacctcttgtttatgctcacagcaagtcttttctcaatccctatttcaagagagtaaccctatagtcggtaaaaacaaatgctgcactagatgttctgtggctttgcttcttttgggggagtttgtagagtgaagatatagatggacaggtgacaactccatagtttcttctcaacttttctcgaacagagagatatgtatcttagaaatatttctttcagcaggtactgttaaaccaaatctctaagatctcacagccaaacagtctaccttggaagatgagtcctgcatttgtgtgaagaagcctgatatatgcaataaattttgagtccctctttgagatgatgaaagaaactgatttaatattaatggcacacttattacaacttgtaattaaaatccttctgttaagagctcattgttttccacatggtaattgagagaaccataatttacctttaaaatatctgttattctgagtgcatgacattctgggaaaaaaaaaggtgataggaaaagaaataaccatccatcatggtcggagaaaggaaggcttactacaaaagcacaagggagcatcaggaagtgacagattttccagatcctggctgtggtggtggtcatgtgactgaacaggtatgcccaaattcttagaactataagcctacataatggcacctcaatgcctctgatgtttaaaaatatctatagaaaaaatcatttgttgcataattctagtacagaaataagaccggaaacaattatccaattaggaagacaaagtttccaagcatatttcaaacactgttttcatacaaacattgcaagaaacaaattttagcataaggagaaaaggctagacccctgaagagcatcctagtgacaacagtccaataagacagccccaaaagatagtttggcccatcctcattatataatgatgtggcaatatagaaaatgtttatgtagttacattgcaggactggtaagatggtttaatcagtcaatcaacaggatctaagctagcttcccagaaacatgtctttttaaaaaaaaaaaaatgtggtggcacaggcttgtaatacgaagagaggtgggtccctagggctccttgcccaggtgagttccagaggtgtgtgtgtgtgtatgtgtgtgtgtgtgtgtgtgagagagagagagagagagagagagagagagagagagagagagagagctgttaaaaaaggaaggaaggaaggaaggaaagaaggaaggaaggaaggaaggaaggatagacagtggatagatggtgcctaaggaataagatctaaggtaatctggtggtaaacacacacacatacatgcccacacatgtatgcagatacacacacataggagcatatatgcacatacatactaaataagtgggctttttaatgcaccacaatcaagtctgctttttgttcacttgtacaaagtaatagtgttttactctaggctagcagttggcacactcttagtataaaggaaaatatttcaaatacctccaaagcagctgtagaaaagagtgagtgtggctgtgccctagtaaaactttatctgaattgaaatccattgaaacagaacttcacctaattctcatgtgccaccaaatattctttacagtttctggcagccatttaaccatttttagctcaaatgcagtgagctggatgtagcttgtggaccacagcttatcaacctctactgtggggtcttagcaaacaattaagagcatcattcaagtgtgaatttctcctgtagtacagattcatccctgctaaagctgtccattcctgaagctacagaactgtgcccataactactcaggttgcctgaactactctatcgctgaaggaagaatgtgtggaacctctagaaatacacagaaagcaaaattctgcctgcagtaaagggaagcagaaaaatggtagatccgtgcatataccctcaggtatttagatcaaaatgcacaaggaaatcttgcccctgaaagtctcactttcttcctttagttgatgtcacctattggtacagtgaagtcttacattagcattcgtttagtttttagattggctacaatttgtgaacactgatttttgtatctttcagatgcataaaatggctttatctttcttcttcctgactcggccatgccaggaaaaacttgcatttatctcaaacagatttatgtgatggcaatacttccagctgcacaaatgaggcaacatctatccccaaattaactcagaagtcaacacaccgtgttcgcttattacatttattgcatcaattatctacaaatgaaatacagctgcgttgtcatttgccccaaaaccccacccatgcttaatgagcttgcaaggtaggcggaagagcagaagcactcactgacaacaaacaggggaaacctgatcctcctccacacaggacatggcacagatgaaattccctgcttttgtaggcagtaggcatcatgttttaaaagaatctaatcgagtatttatcccaaacatgagaagcagtacattcaatttatttactaaatagaaattgggtaaatctggcatccaagccagagttgccactggtcccacagcccaaggtcactggagtcaccctgatctgtgtgggggagagaaaccaaggcaggagacacaagccaatttttccagtccttcagggaaggccaagcctggtattctaacagtcttgctgtctaatcttttcaacatttctttctacagaatagggtggcagaaccatatgctcccagtttccctttaagtttttgtgctttttttcctcaaagagaggcagggctgggggcctggaaggactgaagctaagtcagatttggggactgtctccatatttctactggctgaaggaatttccaagaatctcccccgttgccagtatatattttataggcactaggtgaacacctgttttcaatagcaccttcagctcagatgagtcctctaaggagtggcctaggagcataggccttgctcagagcgaagggaaaatggcttgcccatggctgtcttttctgtttgctttgtaaatgatttctgagccatgtgtggccaaaggcctgtcccagctctggcttacatcatgtgtgtggaactcgagtcccaccatggaatgccatggagaggcgggacatttgtgtaagcctcaggtcagtggaggccttcctcactacaaatggatttgggctcataaactatgccaggttagttttaagcccttgcagtagacctcactgagcagactccaggtgacatgaaaggcagatgtggggcatgtggtgcctggccttataccccttccagatgtctggacccagaatccagggtttggaggtggatatccagggcagctggatcatggagaagtagcctgagcagggtccacacacagcagccacgtgtgacatatctcctcccaaagtaattcatggaccagcaaaaacctttgatctctggtgatagatgggattgtcattaaggaggcctctagccagctctcctagagctaagctcctcagcacacactgagaaactacttagccaccaagtcccttaagactggaagatacagtttaagacacatacccccaaggggtagagaaatcttaccttggccacttgctctgccggtgcctgcaaacaaggcagttttacaatctccacatgaacgctgcagaaggtccagagagccctagtgaccagcgagagctgggtatccttatgccaactgaaacccagccagtctggacttgctatctccacacagcacaccccttcctcatcctctaagccttctcctgccaaaccctgtgcttcgccagcccggctccccacatcaaaacttggcttcacactctcacttaagtgctgtgttgggaagactcagatgaaccacttcagagggtctgagcaaagttgcctggcgtgcatgtggtggaccaagagaatgaattagaccccagtaccagcccaagtaggtttggtcttcaactagaggtgagcagggacactgtgagtacaacaaatttttacaagtcctgcggtgtcgttttttttcacatatgataaaacacaatcaggggccaaagttaggagttaggagaggaaagtatgtacatactacaatttttctggtcaaggccccctttaaaacactcaggctttagtgacccaaaagaagggtgtccagtcaatcgatggcagtgcaggacaggcattggttacggtggctgctgcctaatgatgcgcagtctgaggtgacagctatgtggcttttgtcatcgacctttcctccttaccaaccatccttccactgaggaagatggtgtgtatggcaaagtcagtgattactctgcccactaacactagatgtctgctgagcctcacacagatgcctctagatgtgactgtttcattttgcaaacaaaattctccagtccagaagcctcagtcaacccaaggggctcagtgaagtccatgacttatttgcatgtccacccattttaaagcgttgattaatggtggcaaagcatccacaaggtttatattcctagacatgaaagctttaaaacaccagttatcatgatgtcagactgtttaataccacccaatttcaaaaaaataactggtcatcattgagctgtttctcctctctctctctctctctctctctctctctctctctctctctctctctctctctctctcacacacacacacacacccttgtcattgttgatctgcccatctgccctttacaagccaaaaacaacaagatcaaaagtcttaagtggcacagatgtcaagtagtccccctggactcccacttaacctcttccagaggtctggctagatcctgacaaggaactgatttggtgaggagagcagcaggtttcattggtaaacattgtcccagactccttataaatctccagggctaaggacagtgcaaggacttcatacagttaccatctgctcctagagaaatatgcacaactgcttttcaaaggcaactttgactgcttcactaattgaggctgtttatagcccaatgcaacaaagtctgatgttgcaaactaaaagtactgttgttgtttttccttagaccctcctctgttcttattctttaaactgttatccaaaatcaggtgtgtgaactatctgagaatcagttaaatcagggccttttatctatctgacaagagctatgaggggatttgaagaggtaatgattacaaatgggcagagaattagcatgaaggaatttttctgtatcttgcctctgaacacagtatgtatcactaatttgtcatatagactcgggccatactagactggcctacagccctaatacagtagaacaattgcaggcaatgttgaagccctcaaaaccatcttttcaacttgcagctctttctacaactgaaggaatattacccaagttgtatatacagagtaagatgaaaacatggacattttctgtgggtgcttgtttgaaacaagcttacaaaacattaatagcaaccagaacaatcaagttgtgttctataatcagataacttttgactttagttgagtggtcacttagcaaaggagaaactatgtttgcaaatcaaacatggaatgtgacgtagcagtagttcaatttccagttcctatggtcactaaacagccttcagagactcaggcaactttcttgccttaaaaaaaaaaaaaatactaaaaccagctaccatgtggctttggagtccttctttgtcaaaagcatttgatggtcattaattacatgtttttctccaagtctaagctgtttcaaacctcgttctttgaacaagagaatcacactcaaacacaaagccagtctatggtgggttttattgtatttcacttcatcttttccccaaagccaaaggactcgggttgcatatgagctgacaggcatctgcaagggagagtcaattggagatgatagacagtaggggttgtgactttcaaagatgcaagcagccatatttgaaggggcagagtccagtggtgtgtctgctttcatttacttgtatgtgaatgctttggtcccagggctgttatggagtctgacatctcctggagtgctccaaaaaaaaagccatagccacacaaaaatgtgccacatgacaccttaatcataaccaggaggcaccgcattgtgtggctagccactgtaggcacctcattcccacacccaggctgcagtctgcctctgccattgtgtgcagaaagcaggttctttgaggctgcctgatgacaggaagggagccacaaagatggaggttccttaagcaatgtaagatgacaatctgtgacatgttgagagaactgcaaagggcctccaatcctgtattctgccctaattggccattttgggattggaggcgctcttctggcgggatggctcatggaacaccactggcacagcattttcccttctgtgcctttgatctccctccatccccaccccataaattgccctcttctcatcataacccccacttgatcaaaaatcatactccaggatcccagttcaagtcctacatcctccaagagctttcttggaattattcatgtgtgttcctttctcctgagagatgcacagttaaacttgaccagtttccagttccttaccaaggctagcataacctttgttatgcatgtgagcttatgaaacttcctatctctgactgcacacgaatgcctgagccctacatacagtctctctctgaagtgcctcactacggccaggacagaaaacacagttcttgatctttgcaggcattgctaaaactttaatgcttcctgaggagcaaatgtcttgagaattcaaatttgtatcatctattgaccacatggtaacaatcttccctcttcctcctcccctctcttctctggtgtcctccgctccactccttgcctctcctctatctaaccctccacaataaatacatttcttgttttttcctgaaaaagaaactttggtcaagacactgagatctaagttttcattccaaataacgtaccagggacttagtttgggaaaatatcacaacacttatcctaaatacaaaattcttctaaagacaggaattttcacaaaatgtgttgtttttccaattaaaatgtctccaagttcccatgttgtatgcctgcatgctggtatttcttggatactaccaaatgtatataatctgctttatatctacactttctgtatgtatttattcttctcttacttgaagaatttctaagccatatgccatgtgtcttcctttttatttcttcctttttggttttgtttgttttttctggtttttcaagacaaggtttctctgtgtagccctgactatcctgaaacccctctgtacaccaggctggcctcaaactcacagagatttgcctgtctctgatttccaagtgctgggattaaaggcgtgcaccatcactgcctggctgacatgctttacccaaacagaatgtctgagagtttctagagctctatcataaagaatgctgaatgataattcaatgttcttccaggtctcatgcaactatactttccccaagtagccaaaaagagttgtcttaaagtggcattcataaaagtgagctcaaccccacacctgtcatcacaatccaggtccataacctaatataggagtgcctggaagaagacagtcaaactgccatcaagcacacttttatataatctgtttttttctgatcatttcagcctgaatatttgtataatttaatatttgtccaccaagtctaatatttatcctttatttcttcgaacataataaacacctatgttatatttgatgttctatatacagcagtttctgaaatcctggtggatctgtttccaccatgtattgtttcacttgattctcactcagaacttttctcctgagagcttatggttcaatccttggtcctacaacctgacagggagaaccagtccctgagggctgttctctgacctctacatgcatgttctctctctctctctctctctctctctctctctctctctctctctcatacacacacacacacaccacacacacactcacacacacacacacacacacacacacatgcacacacacatatacatgtgtgcacacacacacacatgcatggacatactacacactctcgaaggaaataataaatattttttaatgaagatgaaaggctagagaagtggctctacagttaagaatactggatgttctcagaggacccaagtttaattctcagaggacacatagagactcacaactgtctgtaatatccaattccaggggattcaacacccttttctagcctccaaagacaccgggcatgcttatgatgtacagacatacatacaggcaaacacccgcacacgtaaaggaaaaaataaataaacctttaaataaaaatggagataaaatggtaacagtttcagacaaagacttagaaattttctaccagaagaagttctgaaagattccaagcagaaggaaatgcaatgccaggtagcaaagaacacagctaaaatatgagtgaaattaaacagataagagctatatttaatacaaatgaggaaggcttgtgaatcaacaacaatagaattcaagggtagaaaaaattaaataaatgctgctttctgggattcttttgtgtttgaaatgaaaatatattgaattttttagactgtgataagtcatcacggatatgctaatttcataactaatcattgaagaagtacaaatagagacaaataaaaaatcaaatgaatcagccaataaattacaaatcaatcacacattaaaaggtaattgatataaatgcaaaaatttacatgtgtaacaaatgtaaggaataaaagttccaataaaaagacaagaaaatggtagatgagctttaaaggtaggtgatattctctattttcttcttacccatcacatgatccaaagaatctcactataaatattttatttatcattttaagtctactataatagagtaagaaatataagctgactgtcctgaaagaccaaaggtaaatgaaaatgggaaaatccctcacctttctcagatggtcttgggcttgtacagtcattttgacagctgttgctgctgcagatattctctggccaacatgtcaatagcccagttgacaagcatcatagctaatcttgattagcaacttgatgaaacgtatagtcaccatggaaacaaatcttcatgtatctgtgagggattattgagatgaggttgatggagtgggaaagacccagctaaaatgtggatggtaccccatggactggagttgtgggctgactagaacaagaatgcatcaaagtgcaagcattcatctctccctctctctccctgcttcctgaggactgatacagtgtaacctgccacctcccatctacgcagtcatgccttccctgctatgatggactgtatgccccgaaactgtgagccaaaatctatccttccttctttacactgcttctagttgggtgttatccacagcagcaagaaaagtaactaagacaacaactgacagtgtgtgagttagaaaaccataggggaaagaagagggatgaaaagagggggatgagtaagagcaggcagaccatcctcacataccaacatagtgccctgcctaaaacataaaatccaaacttagtaatctaagttgcccacagtatggcttaactctcacacacctccctcttacttatcccctccaagctcatctgttcactgggccccagacaccttatccaccttatcttcccccctgcaatctctttctctctctctgtctgtctctccctctctctctccctccccctccctctctctctctctctctctctctctctctctctctctctctctctctctctctctctcgcctgcctaaatgcctcccatctttcaaagcctacctagagcccacctcctcctcacagactttccagtcacaccatgatgatattgacctttggttgatagatccagaaagatggaccaagatgtctagttctatgtagagaggagggagggagggagggagggaaggaaaggggaaaggaaggaaggaaggaaggaaggaaggaaggaaggaaggaaggaaggaaggaaaaacctgccaaggttagattttcatgttgtgtcttcctcttcaacctggctgttcatattttttccatcagttgtctccatgaactacatgttgaaatgttttctttgtctgaaatgcagatatccttattacctttctggatactcatcctgtacctctcttctccaaatctctgctctctagtcccctgtctaggctaaaatctgaatcccctggtccagtgttaacagtgttcccagaaccacaaacacggttcccacgtggctcattaaagtgccaccaaatattatgggagcaaaaaaccccacatgctttgatagccctgcctagcaactaggcacacactctaaaaagatacctcttacagcccctagagttttcagacaataaaatggtaatgatgctgatattactaacagaatataaaacatttattgtgttcttattatgacccagattctatgtcaagaggttcacaagtgttacccatttaatatccacagcaatcccctgcagtagtattatatccccgttttataatgaggttggacaatagaagcccaagagaaaacattactaagatatctagttaataaactttggtagtgaaataaaaaggaaataatctctatttttcttgcaggctctcagaaataatctatgcagccccttaactttttaaccttctttttgctcattaacttaaaaaatcatcagaatgcagaagcacatttattaatctcacttaaggttttcaaattctctcaaataaggaacttcataagcctcaaaatacaagaaaacatgtcaaaggacacctaagtttcctttaaaatctccagtatgtagtttcaggctccaatagtatagcaggagggtttgagcgctatggaacataaagaaaacatatttataagaatggacattcccttcccaggtcataatcatcagactgatatagtgacagagcgaacattgtaaaagtacatgacacttcatcagggtgactcctgctgggaagcatagtcaaggaaccctacctgataagaaagccatgcctgtcaccagtgagggtgcaatatcatctaaggagttagataacaattacccaagaaaggactggggtgtccgcctaccttaagtaccaagatctttggcaaatctcagccttctatatttcattgttggggagggcatcctttagactcagcatgaaaacactgatagacctaggatacccttaaagtaaccaatcagattcagtcagcagtagtgaccatcaaagctatacagtgagggacattggctgtctacttggtggtgattgtatagcatcctttgacaatgctggcaatggctactgttcacataggattttatttgagatgaagttttgtccaggtacttttagagataatgtcagtaaatcctggaaaatcttactaaaaagttattattaaagttagaaagatcagcaaagtagttccagaattaaagttgaatagttgttctgggctgcctcactgagcaggcgcattctccttccagaatataagatgaccacattaaatgtttaagtggcactaagtacatggaataatatctgggtgagataagctcatatatgacccagaatataaatgtatttatcgtcatactcaggagaagggggtaaatatgagaaaatatgaagaaattcataccaagaaaaatttcagatagatcatattctataagaccccacccattcaaaacctaccaactcagtttactagtaaataaattcagaatatattttcagatataacttcatcaatgaaccagagctacagttagggacagaacttgaaaataagtttgctgcattcaggtctctccttcatgcctgaaatactttaaccattttctcagtatatagaactaggctcatgaagcaatcatggtggccacagagtcacccacaggatccatggaccatgtcatcatcacttatttctacaatttctatttccttactgcaaaaataaatggtaatatctatttcttaaggttttttgtatgtataagcacagtgtcatcctggatagtgaaatatcctattctgttctcaaaagaaaggaaggaaaattggtatttggggcagtaagttgttctagtgattaaatagctgtcatcttgtcatttctgggagcagaatccaagtctgtccagtgatgaacaccacacttctcccccaggcttcaccacttctagaacttctgccgaggatgaatgaatcaagctagaaagacagtcttgtcacagattttcagaggaaaagaagtcattctatacatccagagttcacctctccatcaacttgctctaaaaagggcatacaccagccatactatcattgaaaatcaagagctatttgtcttgagaatgaagggcaacctgatgctagcaaatttaaaatgtgatatgcatacaaggacatgaggaacagaagtcccaaagaatgttctgggaaaataccaaaataccatggatcatttctgtagtgaagctacccaggaatgaggagtggacaagccagcagaggtatgtgggaaaaaaaaaagcaaccaggatggtaaaaacaaaagaaggggaggaagaggaaggcagaaataagggaagggagggagggaagggagggaggggagggagggaaggaaggaaggaaagggagaagaagaggaagggaagttaaaagaaaagagaaaagtttggcctggacattacctggaaggaacattccagattagaaagtagcttggattgctttttagttttctgtgtcacctctgaaggcaatatgagcccaaagatgatatttcactctgagtttccctgagcttctactgatcagtttacacaagatgaagcttctcgatgtcatggctactgtcatcctgtttggcttcctcattagtcatagtagccgtgagctccatccttcactactaaacacttggagaccccagcttctataacaccaagttggactctctcagactcttgccattatgacctcgctgcttttgtcagggcatttctttctttttcacttttattattcattcattttacataccaaccacagttccccctccctcccctcctcctgctaccctgaccttccccaacccacctcctcatccactcctcagaaagggtaaggccacaaatccttaactatctgaattactgtatcccaagctcccttcccagaagttcagtggcttctcaaatcaagccttctagaagcttcctgtactagctacttgtctcagtgcttatggtaaaatatcaaacaaaagcaacctaagaaaggaggggtttttttcagcacacagttccaacgtatactccaccactgtggagaagtcaggatggcaggcacatgaggcagctattcacgttcacccatagccaggctagccctcaactcctctttttacttagtccaggactccaacctacagaatggtactactcacatttttagggtgggtcttcctgtgtcaattaaactattctagatgatccctcacaggcatgctcagaggctagcctaatttagaggatccctcacaaacatgctcagaggcttgtcacctaggtgatgctagatcaatggttctcaaccctccgaaagctgcaacccttccacactgttcttcatgctgtggtgacctcccaaccataacattattttcattgctacttcataactataatttggctactgctatgaatcataatgtaaatatctgatatgcaggatatgatatgcaggccctaggaaagagtcgttcaaccctgaagggcttgagacccacaacttgagaaccactgttctagatcatgtcaagttgatactcagtattaactgtgatagttaacatggcccatcattcttgcctccctgactaattctgagctaagggttcctcctgaagagctagcaatctgtattcctcaaaccacagtatttcccaagtcaaatggctacatacaaaaccattatttttcctaaaagaggcagttaatcaaagtgcaggcaagcactccttcctgtttcctgttccgcccctccttgctctcacataatcctggggagatgtaatacacaactttcatagatgttgacattaacacctttccttcaggattacatagtcaaaaagaaagaaagaaagaaaatgtaaagcaatttctacttcaacttgaatattgcatttgcctaagtcatgtaaggacagttgaacctcccaaggtatctgagttctgtctgggcatcaattaccatgtgcagctacttacacatatggtttatttaactccaaaatactcatgcttgtcttctaactgaagtctagcacattagtagacccgggtactgcctaggccctccccaaggagctcatagataataagcagctatggtctgtggccagattcagccccctgctcttattttctaaggaaagttttgctggaacatagctctttccatgtggtccatgattgcctttgttgtagtcccagagtcgagctgtagaaacccacaaagctacagaaaaaaaaaaaacttaactagcccttcacagaaaggttggccaacccctgctaagaactatttacagagttatattttggtaattttcataaagcacgtgggcctgtggattttctggaaatcataggaatttttaatattttatttatttatttattatgtatacagcattctgcttccatgtatatgtgcactccagaagagggcaccagatcttataactgatggttgtgagccaccatgtggttgctgggaattgaactcgggacctctggaagagcagtcagtgctcttaacctctgagccatctctccagcccagtcataggaattcttaagccagataatatcttgacgttaataatgactctctccactgagccacactgcctttccaaatgcttgtctcctctctgtggttccctagttaggccatgcagagggcaactcaaatcgcattacatcgcattgcagagaagaagggctggacagcccagagcatacctcttccatctcttccctgcaagatggaagacgtacacacattgaagattcttcaaattatgatgtatgatcttgggtaacctaagagaggaccctgggaggtggcctccaacaaaccactgcaggcatcattcttcaattctgagtgcttggtgtttgtgttttattgtcatgagttgtatgattgtgagctggccaggttgtgtttggtagttcttaacatctgtttgggaagttgattccttcactcatagaacttcaaatgtagaaaagaacaattggaaccaaagctatctctataaaagaccttgggtgcctgctgtaagtgtcgtagttctggaacttggagactgtggtgcagctgggttttgtctcaggagttggagaggtactagtatagtgttagactaaccagtctagaatagacctccattctctaaatgcaaataccaccccggtgacaaagtcacatgttctccagcaacctaaacacacactccatgctacaaactggatagctacaggccttggagacatgatcgaaataatatactccaggatacactgttctagaaagattgcattgttgggccatccacaaacgcgatgacttacactctgtcaggttgggataaaagaaggatgctgaagccggagagatggatcaatcagtaaagagcatttcatgcaagcatgaagacccaactcaatccctagaaccatgtaaaaaagcatggcagcatgttcttgcaattccagcactggggaggataggcaggaagatgttttgattgacaggccagacagcctggcctagtcagcagcatcaagccagtgaggcaccctctctcaaaaaccaaggcagacagtgactaaggaacaatatccacggttaacctctgggctccacacatgcacacctatacaaatatgcaaatcacacacacacacattttttaaagatgatctggcctagatgattacagaaatatgtatatgttgatttttttggttttatttgaaatttttgagtgacatgtgctgtgatttttgtttgtttgttttgaaaaaaaatgtctcattatttagcccaagctatcctgaaactggtaggaagcccaagctaaccttgaacttacaaagcactatggtttcaggagtacactactacacatgctttattggaatacacttaaatttcatttcttttttgtttctatttttaaactgtatttatttttatattctgtacatgggtgttttgcctacatgtatatctatgcaccacttgcctgcctggtactcacagaggccagaaaagagcccgatcccctagaactgaagttacagacagctgtgagccaccatgtgggttctggaaactgactctgggtcctctacaagaacaaccagtgctcttacccactgagccatcttatcaacccctttaaattcatttcgtattggcatacaagatgtatgtaaacaaaatttacttaaaggggttccctgataggaatgggtgagtaggtgacctggaaaaaggaagcagacacggcctttccagtcacccaggactttggattaccactctgacaggctgctcagggtaagtactgtctccccataggatctgaaagttaaatctggctaaggagttaccctctgagaggaggatgagaatgttaagtactggttctgccccacctgagtctctgtcctgggagccatcctcttcctctgctttaactcttgccatccacatatcagccaagaaaagatcgcaaccggtatcttataaacccagagagagaggaactagtaaactcgtaaacacagtgactgagtaaaattgtaactttcaaattgagccactctccgggaggcaggaggagggagtaaagaaagaggctatgaaggagcatctttagaaggaaaagatggaaaacctgcctgctcccgagtagctagacttccagagagaaagacaaaatagaggcaaaaaaacatctggagggagcagggaagatgttccatggttagcagcactcggtgctcctgcaggagacctgagttctttttctggaatccaccatcaggcagcctaggattgctctgacagcagaggccaggaaacctgacaccctctgctggtctctgcagatacctgtgctcacacgtgcacatcctcacatagacacattcgcatacccatgatcaaaatttaataaaccttttacattttttaaggaataacaaaaatagtttcttgaaagtacaagaaaacagaagaaaataaaatgtaaaacagttctaaatatcaaatggggcatattaagaaaaagcatgcctctacatagaggtaaattaaagattaaaaaagacaaaacaaaaatgcctaaatgctgcataaggaaagcaagaaacacgccatgctccaccccctcactcttaacactgtattcaagcaatcaatggagaaatatttttaaattatggaagaaacattgaaattgccattcaaacctgggagcatgataaaaagtgttcaggcacagagcttacaaagtctggctacaaacctctgccagtgtaaggatgactcagacatatggagatgcaggaaatgatagggtaccaaatttcttagtgagatttattactgccaattttaaaggacaaaagaaaaatatatataattgaccagaagtaaaattctaaataatataaatgacatatatccagctaaagacactgagtaggagtaaatttgagaatgtctcttttaaggatcatgtaaatattgggaagctcggaaattaatgatgcttttggttgcctacaacaatgtgacagtaagaccatatagctgaagaaattacagggtatgttcatgggacatggagcaatcaagctggcacagaccagaaagctttcttcccactggctagttttcataatactggaaggcactgtgtgggttgctggggggggggtaatcatcatatatcttactcaattgtgtaccctacgagctacaataatgacccaacagaacaccgcccctatgtttaaagttcaagtaacatcaagaaagaggaagtagaaagattgtaagagccggaggaccattagtgtcagtgcaggacccagatttcaggtcaaatccccagccgtggtaggaccatggaccccaacattgtctttagcagcagctgagtctaggtctcacttaggacttttaactcatctaaaaataagtttacatctttttcacattaaaaaataaatcatcccttgggctccacactagtgcccacagctctggcagctttaccagaggccacagtggtcctaaggtcctcagggaagacactcctcccctgggatccatatcctgatctacaacttcagaagaagacttcagctctaccagaggacaggcccagagaggacatcctactgaacctggagacaggctagtcaccagaacccttgaccatttaggccattagaccagagaagaaacagaaaccaaggaacaaaacacccatccaacaaaggcaaatgcaggaatcaacacctagaccttataatcatcccaaatccagatgcctaaacaccagtgtaaaaacataatcaacaacagataacccaatatggcatcaccagaacccagctatcctacaatagcaagacctgaatagcaaagcttcagcacagctgaagcacaagaaaatgaaccttaaaaatgactttatgaagatgatagaggtctttaaagaggatatgggggaaatccctttaaaaaaaatttgaggaaaagacaaacaaaaactggaagaaatcaattagtcgctaaaagaaagctaaggggggagaaccagatgaaggaaactgttcaagacctgaaaatggacatagaatcaataaagaaaagacaaacagagggattcctggaaatggaaaatctgggtaagcgaacaggaactacagatgaagtcaccagcaaaatacaagagatggaagaaagaatctcaggcattgaagatacaatagaggaaatagatttatccgtcatagaaaatgttaaatcaaggggatgcaaatcagaaaggaagaagtcaaaattttgtttttcacagatatgggagcatatagtgacttccaaaaattctaccagggaactcctacagctgataaacatgtttagtcaagtggctggatacaagatgaactcaaaaaatcagtagccctcttatacacaaatgataaaagggctgagaaagaaattagggaatctacacccttcaacaaagctacaaataatataaaatatcttggtgtaactccaaccaagcaagtgaaagacctgtatgacaagaacttcaagtcttgaagaatttggaaaagatatcagaagatggaaaaatttcccatgttcatggatcagaaggattaatatgttaaaaatggctatcttaccaaaagcaatctacagattcagtgcaattctcctttagattccagcacaattctttacagaccttgaaagaacaatactcagtttcatatggaaaaacaaaaaacccaggatagctaaaatgatcttgtacaacaaaagaactttcagtattaccatcactgatttcaagctgtactacagagctatgttaataaaaaacacatggtattagaatagaaacggacaggtggattgatggaatcaaatcgaagactcagacataaatccaaatatctatggacacctgattttcagcaaaaaaaaaatatacaattgaaataaaaggaagcatcttcaacaaataggactggtataatggatgtccgcatgttgaagaatgcaaatagatccatatctatcatcctgcacaaaactcaagtccaagtggatcaaagacttcaacataaatccagatacatgaatctgatagaagagaaagtggaacacattgtcacaggagacaacttcctgaacagagcaccaatagtacaggcactaagattgacaattaataaatgggacctcctgaaattgaagagtttctgtaaggcaaaggataccatcaatagtactaaacagcaggctacagaatgggcaaagatattcaccaacccaacatctgacagagaggtgatttccaaaatatataaagaactcaagaaaccagatgtcaacaaacaaaataactcaattaaaaatggggtacactccctcattgttgtagggaatgcaaatttgtcactcactttggaaataagtgtgatgctttctcagaaaactgggaatcaatctaccacaagaaccatctatatcaatcttgggcatatacccaaaggatacacaatcataccacaaggacacttgctcaactgtgttcatagcagctttacttgtaatagacagaacctggaaacaatctagatgtccctcaatgaaaaatggataaagaaaatgtggtatgtttactcaatggagtattactcacctgttaaaaacaagaacaccagaaaatttgaaggcaaatggatggaactagaaaaaaatcatcctgaggtaacccagaaggagaaagacaagcatggtatttactcactcataagtggacattagctgtaaaataaaggataactatgctacaatacacagacccagagagacttggtaacaggaggattcatggggagatggccagattgcccttggaagaagaactagaaaagatttcatgagtggactgagggcaggtgggtatgggaacatgagtaattgggtgggggtgggagtactggaagagactactggaagtgggggtgcatttcagggtcagctaaaaacctgatgcaaaggaatctcccaggaatctataaggatggccccagataatactcctaccaataatagatacataacctgaactggctgtctcctgcaccagactggtgcctagcccaattgtcatcagagaagcttcatccagaaactgatggaaatagatgcagacccacagccaaatattaagtggagtttggtgaatcctgcagaaaatggggagaaaagatgaaaggagccagagggggcaaggacaccacaagaaaactcacggaatcaactaacctgggctcatggaggctcatagaaactgaactgacagccagggagcctgcatgggaatgacataggcactctgcacatatgttacagttgtgtagcttggtcctcttgtgggactcctaacaataggaacaggggctgtctctgactcttttactgacttttgggaccctactcctcatactgggtcaccttgcccagccttaatacaaggggaggtatttagtcttcctgcaacttgatatgacttattctgttgatacttatgggaaacatgccctttcctaaacagaaatggaggaggagtgaatcagagtggggtgcggggtagaaactgagaggagaggagggaggggaaactgcagctggggtgtaaatttaattaattaattaaatttataaatttatcttttaaaaactgagagaggatttgaacttatggatatgttcacttactagagaagatttgcctttcttctagaagccaatcatattgtggcataaacaatcccaagttagcacaatccaatcagagtttaagattagaagaaaactaaactttagtgtttgctcggctgcacccaagttttgctttacccttactcatacaatgactccatacctcacatgtaagacttcacaacaaaaatgaccattttctggagtgtcataaatttcttttaaaaaaatctctgctcatttctttatcagaaaatgaaataagcaaattccttgagagagaaaaaagtaattcccaaatgctcagagcaattgtacccaaggactggccttcctgtgtctctagagctcccttatagattgacaggaccattaattagattaaaatatttatcaggttaccagctgccttatggggggcaggtagatctaaagtagttattaccagaaggcttcccaccactgaaatattttaaaattaaatctattacatcctcttagtcacaatctgtatttgaagtttatattcacaatatctattcttcaattacatattcacattttaacccactcaaatttgactttcacctcaaccatctacaataacaataatgagggctaaagtcagcaatggctgcctggttaaaccagaatgttgtttcttattcctctcctgtttctggcatctcagcatcatttgtcatatctgccttcctctcctgagacattctctttcccttgtgtccatattataattttttcctcttgctggctcatcctcctctgtcgagaaaattaatgttttattactcagtggttgaaatacagccctgtctctttcacactctgtgttctcttaggtgatcccattcagccaagagaaataacttatttatatttgaaaataattcatatattttatgtccaactcagacccatcctcttggctctagatccataaatccaaggaattcttgaaacttcctcctgaatatcataaaagacaccagaaaatgagagaatcagaagtcaaactggtaattagccacagctaaagaaaagcagctaggatggccatcgaaaaggacaaatgataacaaatgctgggtagtgtgtgaagagagactcctatgccctgtttgtaggaatatgtattagtatgactgtgatgaggttccccggaaaagtaaagtagaactatcatataatccagcaactccacctgtgcaatatatacaaagtaaaattaataaatcaaagagctgcttgaacttccatacccaatgtagcactactcataatagtcaagctatagactcaacccaggtatcaatcagtagatgaatgaatgaataaaaaatacagtgtgtgtgtgtgtgtgtgtgtgtgtgtgtgtgtgtgtgtgtgtgtgtgtgtttacaatggaattcaactaagacataaaaataagtgaaaccctgacatttatgacaacttggatgattctgaagtacctattaagtcaaataagccaaccacagacaaatacaacaagttctcactcatatgaagaagctaaagatgctgatgcattatcaaaacagagtagaacagtgagtacatagaggaagtatgaaggtaggttaaacaatggaatcaacactgacaaataatttctagtgttctgtagtacaccaaggagtctagtctatgacaacgtagattttataataaactattagagcgagtcagctctaaagaaatgatgaccatttgagaatcaaaatgctaactctcctgatatgatccataaacactatacagatgtgttgaataatcacaatttatctattaaatgtgtaaaattattatatgacaattcaaaattttgaagtagaaaaaatagggctatcaatcagtgaatgaaaatcaccttgggagagatggagaatgttacaaggctgcaatagaggcatcaaacagaaggaatatgttcaaagtacatcatgtacttgcatgaaatgacattataaaacactgtataataattgaatattacaattatattatttaatgtatcccatactcaaacttttgtaaacatccttcatagttttttctagtatttttctcctgaatagtaaatatcaagaacagcaaagtatccttgattgtcgttgtcttttttaaaatgtagaatatcacaccacacatacaggaggagtattttttttttttggcctcacatgattgacaattttgagagctataaagcagaggtcttattgagtgtcctacattcaggatttttcatattgtttccttctagttagattcacattgagcatattttataaaaatacaataaacttttaaattgtattctcatcaaaagccacaggcaagcagtagtggaaagctcaatattcaaatctcattaattttcttctaagttgttgtcttaactacctctttgttggtgtgataaaaacacctgaacaagggtggtggtggcacatgcctttaatcccagcacttgggaggtagaggaaggtggatctctgtgagttcaagaccagcctggtctacaagaactagttgaaaaaaaaaaaacttaacaatagcaacctatcggggaaggggtctgctgtggttcacagtttaggctatgtctatttaagaggggaatcagcagcagcttaaagcagaggttcatacacagtttaaggttaagtccattgtaggaggaaatttatcagagaataaagaatgcttgtactagttcacttacttctttttttacagtccaggatcccttccaagagaatggtgccacccatagtgggcaggccttttcacctcgatttacttaatcaagataataccaaaaggcatgcaaaggcctgtctcccagaagaatccagatatcatcaagttgacaagtgagattaactgtcatcactccattcttgtcaacttgacacccaaacacatcctttaaataataaccttctgccagttgtcccaaagtctcatattcacttaataatgcagaatacaaccaaacatcaaaagtccccatagtttttaacagttttcgagatgtttaaaagttcaaagttgagacaggagaaaaggattgatggacaagaactcatattgctcttgcagaggacccaggtttcataccacatggcagctcacaaccatctataactccagttctaggaggcccaatgtccttttctgcctgtcttggatgcacacacacacacacacacacacacacacacacacacacactcacacacacatgcacacacacataaaacaaatcttaaaagacatgaaataaagtttggaaaaaatatgagacaccaccaagagaactaacaatcccgtaatgggaattacagatgagagagaaaaggatgaagaaatcaaattttaaaagatgactcaaaacttcccaatccagggatatatgacaatatctataaataagaagtgtttaaagctctccaaacaaatttagcaatccaacataccatataagctacctaaagtcagaggcaggggtgagttcaatatagttcaataatagaactcttgctttacactaatgaggctctggggttcaaccctcagcgttgaaaaatataaaatcaaacacaaagaaaaaatgtttgagagccatgagagctaagaaacctatgacacatccaagaatttcaacgtggccacaagcagaattctcaggagagagtcttcaggtcaaccaataacgtcttcagctacactgtcattcataaaagagattacagtgtcattcagtaaataaaaattctcccagacagagaaaagctaagagttacaagactaccttacagaaatgagtaatgggtgggtttttttggaagctgaaattaattaactctgattgataatgtatacaaaagcacaaaactcatagtttcattttcagaataataatgattaaattgtggtaagtatggtgctcaatgctaccatgaggcttaaaaaacaaaactactataaacaaccacagtcaaaatgaattctgagggcttcaaattctgagataacacaaatcttgacattaaaaatgcacaggcatatctctgtgagttcgagaccagcctagtctatagagtgcatttcagagaaacactttcccaaaaaacaaacacataataaaaatgtaatgggtagcaaaagcacagagctgtatacaaagtcaagctgcctttgaagtaacttgaactagcctgttttacgtctgagatatcttgtgtaagcttcctggtaaccacaatgcagagacctatactatagagcactgtagaaagtcaccaaaccagacagcaaaggagggaggggtccagaaaataggatcactgtgggagatcctgacctacacacaatcattttgagtgtataaacagattaagttctatgattaaaagctacagagtgcctcctttctctgccttccatccaccatgatgtgaacagtttcagtcatacaccatggtgcttgcctcacaaaaggcccagaaaacaaagagcctcagcaaaatcctatgtgcaggctcacagcctactcagtaagggacatctcttactgaagccagtccatcaaggtctcaaacgttggccaattcttcacatacagattataaacccaagaaaataaggaatgctatcacctgtgatatttagtctttattgtcaacttgactggatttcggatcacctaggagacacacttgtagatatgcctttgagagtttcccgagagatataaccgaggagggaggatttaccctgaatgtggtgttagcttcctacaggctggaggcaaacacatgataaaagaggaaaggggtaaagccagcaaagcaccagaattcatttcactcttcttcctgcctgtagacaaaatgtggtcaaattcccagcatcctgaattctctgttccagactgtatttcccacaaactatgagcccaaagtcagccctttctcccataagttgctttgttagatatcttgtcaaaacaatgaagaatatactaccaaaggaacacaataaaaacccaattggtaaacctaaagaagtggctctccaacagttatctaaaaaataaccaagaaaattaataagttcagcaatcttcaagaaaatatatgaaatgaaatcagaaattatatacataaacaaaatagaaatccaatacaaagtcacaacacacaaaaaagaaccaagtagaaattctgaaattaaaaaatatagcaactggggctggagagatggctcagaggttaagagcacttccagaggacctgggttcaattcccagcacccacatgatgactcacaatcatccaaaatgaaatctggtgccgtcttctggcctgtagggatacatgcagacagaatactgtatacataataaacaaatattttttaaaaaaagaatatagcaactgaagtaacaaatgaatagtttaacaacagactcaatcagaagaaatgggaaactcaaagacaagtagcttggaattctcaagatagaagagaaaaaaataaaaaagaatgaggaaatcctggaagaattataagacatcaatatacagattctaacagtattagaagagggaatagaagggaaagctcatttcaggaaacagcaaatacattcttccaagttgacagcatgactaaatactatcccattttatttataaaggagaaaagacataccacatattcttatccattcacctacaaaggatacttaggttaattctgagtcttattgctatgatgctacaataaacatgagacctgtcttagagttactattgctgtaatgaaacacgatgaccaaaaacaacttgggaaagaaagggtttattaggcttctgcttccacatcacagctcatcattaaagaaagtagagacaggaactcaaatagggcaggaacctagaggcaggatctggcacagaggccatggagaagtgaagcttactggcttgctccttgtggcttgctcaacctgctttcttatagaacttgggactgccacccacaatggactgagccctcccaaacaattgctaagaaaattctctaaggtttgcctgtagccacatcttatgaaggcatcttctcaaatgattctaacctatgttaacataaaactagccagcacaaaactatacaatggttttaacttttttttctcttttttttatttttagttagtgagtttattgagacagagtctcactgtgtagcccttcctagcctactagtcactatcactagcattgaactaacagatctgcctgcctctgcctcctgagtgctggaactaaagacatgcactaccacatctagctgctattttagctttttaagtaatatacatattttttagcaataactctttccaccagccgcctgagttccgcagccatgttagggcccccaaataacacacagagtcttatattagctataatactgctggccaatgactaggatttctcatttgctagcactgtcccaagtatcaaccataaccattaatctatatattttataaagacttatcgaggacgtcctctcttgccaggatcacatggcaactcctgtctttactatatttcccagaatcctcctcgactcctagccccacttatcttgctttcctattggccagtgatttatttatcaaccaataagacaaacatatacacagaaggacttcccccatcaattatcaataaagagtatactaatttatacatcaacaatgtacaaggattccttattctccataaacctcactatatctttttcttttgtgtctttataccagtcattctgataggtaaagtcataagacaatgtgggggtgtttccatattggtacatattaattacacatcatcattgatgttatgacattttcatgtataacactttgtatttacccattaaatgactgcactttgacttgcatttctctcatgatttagttcatgtttaataatgtaccagtgggcatatgtacatcttttacgaatgcctatttgtataagcaccactttcatacatatggttatgtgtagctttgctattgaactgtatacacttattctgaacattaacccttcatcaaatgcagaatttacaagcttttttctccctctctgtaggttgtctacttactctgtacattgttgcacttggtgtgaataagtttcacagtccagtgtgattaatttaggacactgaataaaataagccactgagtgttgggacacagtccaagaatgaagtcatgtgagaagaattctggatgcttgtgaaaaaaactccaagaaaacaagacaagagtcttgtgacctcagtttcttcaaaacttggaattgttcttgggaaaatgtttttaagttcctcccagatttagtggataggaatgagtttacttcagattattcattgcaaatggctaatgttatttgttcatatgcttctatagaaaaacatgtttttaaataatgcagtctgtgcttgtgactgtacactttattcaagtgactcttcttaacccttggagtataaattgtctgatgctctgaataaagttggctattgcatgagactttagtctgtctcatttatcagctccattctcccaggtcccaccaccattctagagcggtaaacaactgaggacattaagttaaataagccaggtatgtaaataatattatattatttcattgatatgttgaattaaaacaactgacatcagattaaatacaggaaaacagtgattaccaggtggtaaagaggacagtgagggtggctggtcaaatgggtacagttatagctagatagaaagcataggtttgagtgttctactgtataatgcagtgattaaagttaagaattcatggactatttaaaaaccgaagagatactttttatgattttacaagtaaatactgcaagtatttgaccatgctaactgctcctttgactgttacaaaatgtatacatgaaccaaaaaatcacactgatataaaagagtttaattgttggagttgtaccacacggggttaatgctcttcccaagagtcataggttgtcaaatacaaagcccagttccatatgtggaatactttccctccagtttttggtcagggatatcctggagaccctcaaaacagtataaattgtccaccataacttgatgataaggccctattcctggaaacatcacatggagaaatcaaatttgcttcttttctgttggctagctttcatagtaccagaaagtggagaaatggtggagaaaaatcgtcatcagtcttacccagctatgaatccagagagctacaataataaccggtgtggcaaggggtgcaatagtgactcagatgttatggaaacaaccagtagctccctgattggatgtaagtcccacaggaggaaacttgtgagtagtactgtaaatctgacagagacagacccccaccactctttcctactgattccttgtgatatgccatgttttccacagccgtgaactagtctgtatccatggcaaaatggactaaaaccttgagttaaaaataaacattttgggtcaggaataaggtcagtgataaagttttatcaagcatgtgacaagccttggattcaatccccagtactgaaaaaagaatatgatcataaaataagtctttacaaccatagatcgtttcttccaggtattgaaccacagatgccaaaggagctaactaacgtggtcatgaatcctaccccataggctctgtttctttggaagtcaatgttgttgggagttaggaagatacaaacaatggggtcaccacaagggttttcataaggaaattctagggtgggcagaaaggaattactatagtaaattctggaatgctcacaactcaccttcattgtccatcagtgctcaaaagatcttgttgtatacctagattgcaaatcagtaaaaattcctcaaaaaaaatgagctatcattagtgacaaagttatttgctcattttaatttggaagggggggaacattcagacttcaaagtcaaattcccatgttccttatcagctaatcttcccttttaagccaaactatcaccacacaactgactttgagctgttgacaaaagtaaccatgaccacctttcctttgcatctttgcaccaaaagcataactgggactctgtgactctcaaacatcatcacaccatcctgtcaccaggtcacacagctgttccacagcctattataaatcaagtcatgaaattagcattatttaaaccaaaagaaaaattttggtgggttttgttttggttttggttactttctatctctagagaagggagttactgtcaaatccatagtataacttggggaggagaggacatcactggaaataagtgaagttctgactggcagtcttgatttatggggcaattggagaacctgattaccatgtatttctagctgtcgctagagataagtgcattcagggaagtgctactgaagtgtttccttcacttccttgacagcaaaggcaagaatgaatgctctaaatcactgcaaatattcagaacatgagagacaaatggaagtcacatcttcctcaagctgcagaagtaccactgctttacaaggttcaccaggagtttgtgggaaactttgatctttcttctttcacttccagaggagcccatgacgcccctgtttgttcagctggctctggcaagaactcgtcactgaagaaacaaaggtgatgtcaaatggatggctatgctgaaagtgtgttcgttcttcatagctctcatgtcttcatagataataaatgatgtttttaaaagaagggagatgctctgtcacttctattcccctacctcaccccatggtaatccttaaaacaggaaggttaaaacacagcttcgccctgaatttcactctctcatgacaaacaagtttacacaatatacaatcataaggaagaaaaactgaaggtttagctcttggctcctaataccactatttgtagtcatcaggtgtcccaaatttagtctgtatgcctacttgtgtgtttatacattttcatatattgtatacatgtataacgtttttcaattgctgatatcccatacactttccctctcttttattgccactgcaactactcactactaattcagaccctgaagtacctaggagtcctttttaatttttttttctccaaggggttgctttattccacagttcacatacacttttagattaggaagaagaaagcccacatttttatctataattttaaaagtccctttaaaaataaagtggccaaaactgcatttgtttttataaactatcattaatccagtagcaacctcagttcctgccaaatgactctggctaatgcaaactcagttcatttttcttgcaaagaccatgatttcctcttcatttgagcatctttcccattcacctaactcttttggtgtgtctgtttcttgtttgaattaaatatgatttccctaggagccctttcgaaagttttaagagacacaaaaatacatacaagaactcatatgaaaatttctagtgaaatagtaatggaatcaaacagggacattcccccatctctcgtctccaaatccctctgctcccagaagtaactaatgtggaaacatgaagcatacactccccggccttttggtaacacatagacattttcacatgaattagctcatattggaacttgctttgttttgctgctgttttcatttaacaatgccttctagatgttttttccttctgcacatagaaaaccatcccaatcttttcatctctatactgaaatccaaaggccacatgtctcacggtgtaagtattgcggttcaatatttgacacatgtaaatagtctttcacaaactgctgagcaggaatactcctctgcatgtgtttccatccacatatgtggtcccgacatgaacatctccatataataaatcccttgaaatggttcttaaatcttaatagccccatccaagttgaactccaaaaaggatatgtaccaatttacaactaagtaaacgtgtgtatttcccctttcctgccaactgctgccctctgatatatgtatgatgggtatccggcccctgcttctgatttacacctctcctgagctgttgcgttctttctaactggtctgtcagaattctggacctcagctcgctgcgttacacaaagaacgctcttgggattgtaaagcttcctccgaatgggatgaacatctgtatccacagagtactcttgtctttatgtctcactgttcaatgttcttcttctcgccttactacagtttagatgtgagcgtgactaacagtttacacggattactctttataactagtcacatttctaaactccttttattaagtcattaataagtataagtcgtaatagaccagggtttcttgctgtacaactagctagtttgttggtagctgctgttttctctcttttgttacttctttttttcccattgccttggctactacatccaaaaactgttcactccttgcctcattcttgttgggaatggaaatgctttctttttcattttatatgtggtatgtatgtatgtatgtatgtatgtatgtatgtatatgttcatgtgtatgtaggtatccatgtgtgtagctgcatgtggagatcaaaagttgatattgggtgcattagtcaatcattcttcattttatttattgagacaaggtctttcactaaatccagctagtgcatctaggcagcttacactaggactctccgcctctgcctcccaagcactgagattgcaggagttagtcagtcctggttggcttttatatgagtcctggggatttgaactttgattcccatacctgcatgataagcactttacacactgagccatctcttgcccctgaaaaataatttagtttgttgttaagtatggaaccaacaataggtttcttgtatattcattttccaactcaaaacttgtttctgctcctacgttaccacctactgattctaatgggaacaatactataccaccaactgattctaatggtaacagtgctagatttgaccataagtttaagttatatccactgatagaatcttgtggtggaaaatacagccaagttcatcaagaggtttcctgagagtgaaaacttcttatcttcctgataaatgtttgcattaccttccaactcaacacatgtcactgtagaacgaacttgagaagaaacaaaagctgcacttgggagaaagaacaccttcctcaggacacgataagtttgtccattccactcccaacagatcacttctcaacatctagctcccagcagacttggatcaaatttggactggaagaaatccaaatggatgggataatagataggattatttttttcatttctgtgatagggtcataaaatgccaacagaaagataatgctagcttgctgcttccaagagccaaggatttgaaacaacctgaggaaaaaaaaatgaccctgagctagcccattctaaattttccctagttgtcaagtgtaaatacagtgtgattcattaaatttgccctacggtgatctgatccatgcttgtggtttttaaaatcatgtataaatagaagggattgctaatggtctgcatgttactttgagagttaataagagttaataaacgtatagcacaattagatagtggtgatttcggttttactctccaagtataccaaaatatcttagttatacacattggttgaattttatgatgtataatttaaattctaataaagatgttatacacaaaaaattcatggcttccttgtatgaaattcaaatgtaaatgagtatcctacctaccctagcttggctccaaattaacttgccttaatgtctcacatcttagttgctatgtgatcttaatatattggagaccgctccaagttgagtcaccttgatgataaatgagctcttttcatgattaatagacttgaggaacataaaattcttagcacaaacaaggctcgcataggaggcttatttgcagaggagagagaagaggcagagaaagaggcagacaggagggcagagaagagaacagagaccagtccctggggacaagagtagtggaagagagagggaggagaggggggaggaggtgggcaaggcccaccttttaaatgagagcacagtgaatgtagacaggaggttctcctagtggctgcagctgagaacatatcctgtcaggaccccaaggacacaccttagtacagatgcctaaatactaacacagtttatacatattttgtgtaattattcagaagtagactatgtccatatgtgttattcttgactcaatttctccaaataatttttttacttgttatattaaagtccatgtcataaaagggcagtgtttcagctttctattctctaatacaagaatagaaattttcatgcttttaaatctcaatttgaaggattgggggaaaaattttccttacagaattttcttgttttaatacataatttcactttttctattgtgttatggttctatttgatttttcagaaagcctttgtaacctgttttttccctctcttttaaaagtgccatgcatatgttacccaattgtcttgtatataaaatatattacaaacatttctttctcattcaaaaaaaaaaaaaaaaaaacgcttaacacataggaaacaatgcctgataggtaaatcctaggacttaaataatggtaacaccagtggggctagaacatagtgtgctggacaggaagttacaagacacatgttttcattcctgtgagtgcttggaactagctctgtgaccatatgcaagtccctaaactttcctgtttcaatttccttatctatgaaataagaaggttggattaaatggcctgtctctgattaaatgaccccttccccattgcttgaactttgaggaactatatgaaaatgttgtcaattccccttaaggaaattctttccatagaacagtcaatgattaataccctccaaattctgtcgagagtaaaggtatgctgagtggggattttagtagcattagctttgaggaatacaggtgcaattggtcatacttattctcagacaacagcccatgtggtttcatggtttcaccttaagttataaatcaaatcctggagtctgagctcaatccagcaccctgaatgtgagttacaacatcttcagccttaacacaatatgcactgtggtatcctggttgtcagggcacagtggtttatgatggtcagaggaatgagttgtatggtttccaaatacatactgcaacgtgcctttcgaattaaaccaatactttcctcggatttcattttaatttaactgagaataaatttcagggtccccccccctataaaccactagaaagcttctgattttatagtggttattgttactgttgtccagtaggccaagaagaaacagtgaacccatttacaattgaagagtcatttaaacccatatgcatttgattttcaaaaccataaagccaccttccatatatcatatttctagaaccagccaagtatacatgcacgaatgtgtgttcatacatacacacacatacaatatacatattgcttacacatccaatgtctcaataaaaattcctatttattgaaaagttcatgctttgggtttttgtccattttgttttgttttacccatgcactgttaacactggaaagaaaactattggtctgattcccttgtctgatgaggaaactcaggcccagaagtgttagatgagctctctaaggacaaaaggtagcaaggctatcttttctctgatacaatctttattccgacaccttatgctttaggtatcagagctcaataagatattagaggtaaaataacttggaaccctcaagcctctgaggagctaccttcacagaaaaccacagtaaacactggtgtgaaaacaaggactaagacaaggtcttatacttcaggcaggtaattctctccatgttaaagaactagccccatccatttcaatccacagctgtcccatgacacccgacaccttatgctttaggtatcagagctcatataagatagttagaaatagttttcctgagacatcatttgacatcctataacgtcctattcctgaaagccctgactactattacaagaatttctcctgacatcatttgttacaggcatgtttgcaggtagtcatggcataaagcaagaaaatatgggatctgctcccaggcctgctgctaactcactggggtcacctggaataagtgattcattatgcaacagggtagctgattacaggatccaaaatctcctcctcacgttataacattccacaaatacagaatactaagcctacacaaggcgtcagtagttgagagggaagagaagagagttgaggaggactaagcctggaactagccaacccaaaacaccaaggcatgcaaagtgtttccaagacatgtaccagaagcaaggccaacaactaaagtgttctctacttctattctggatagccttgtctactgacacagatgttcttttggagaaatcacccaccctgcttctcacttcagcatctgctccagcatgctgagctaccataacacattcattctctgtagctggaatgtcaaaagctgtccccataattctaatcactgacataatggagcataccagtgctaagggatagataggaccaacctgggttagaatgaagacagttttggaatgggactctgctaggccactttctgctttgcattcttattccaggaagccatgggatcactcagctctcatgctgaaaacacctgcaagcccttggcctccaacttcaagcaaaccaaagtgccttgtgtcaactgctgctgactcagcagaagacagacagtaacacttaagacaaacagccttgttttcattttggctatgttcaggagatcctgctggtggaggccaattttacaaacatcataataaatttcttcctcaaaaatatgaatcatcatggatattagtttgctgacaacatctcttgccatggggaaatggaaaaaccatcactctacaaagtgccacgcaaatgccaaatgaatcctttgctacaggatataaggaaaaagcagaggacctagacaggcattagccatgagatccaaggacctaggtcaagcccagctctggaaggagactgtaattgtgagggggcaacttcatcttctaagctgtagtcatatccccaggtaaatgggcacagacaaactcagattccagttggaatcccctccccactgaagacatgactatttatatttttctctctgtgtctctctctccgtgtgtatgtgtgtgtgtgtgtgtgtgtgtgtgtgtgtctgtctgtctgtctgtctgtctgtctttcactctgtctctctgtgtgtgtctctctgtttccctcttgctctggcactctctctctgtgtctctctgtctctctgtctctgtgtgtgtgtctctctcctgtctctgtcttcctcttgctctggcattctctctctctgtctctctctctctctgtctctctctctctctctctctctctctctctctctctctctctctctgtgtgtgtgtgtgtgtgtgtgtgtgtgcctgtctgtctttcactctgtgtgtgtgtctgtctccctcttgctctggctctgtgtgtgtgtgtgtgtgtgtgtgtgtgtgtggtgtttccgctttcaagaaaacctggatatgtactgaggaaaaaataaaaagacccaggctcaatgatttccagagaacccctcccccacactgctaccttctgatcctatattcttttctcagccagtggctagtaaattacctgctttggaagatgcattaattctcacaggccactgaggtaccatttaacactttctaggatgataaatcagtcactctcttaccccgtacaaaccttggaaagtttttacatgtctcaagccatggagaattatggaagagcaggtgcctctggattaaccacggggcaaatcctggcgctggagccttgaggtactggctcccttctagtttttcagatgacctggaatcccaatctgagtctcttctgtaaatcaggaactaactgaaaattaccaacacccacatgaagcatgagaagaagtaatggcttggtgcccccacatccccacgcagtcacatatgcactctttcctccacgctcagggcagactgcaaacctttaagaacccagtgaaaaaggaaaatgtcagtgggcagaggaaaggtctgaaattgaaaatactttccagccttccatttcgcctgacatgaagtttcttatttgctatttaacaccaaactcgctcagcccaggggaaccagtggggaagagttcaacccctcagacaaaggcacagcttgacacacacaggcacctccgactgccattctctctgctacaaacttgcccttccccttccggcaacctgctaccccaatccatggtggatctgtggcccctaaatctattgccacctctgcaccaggtgctatgggggtgtgattcaagagtgacaatcagttctaccaagttacctgcagaaggtaccattgtgctaccagcctgaggcagggatagccctggcacacccgaccctaacatttgcaggactcatgctatcccttccagccctactcaagcaaagagcaacactgctcccatctgtaagaggaaggtggaaaagtcagcaggacagtaggtagggaccagagttcccagaggggggggtgtagaggtagaagaaagaagcaggcagccaagctctgtttctagggaggtgggtcatagtgagccgtgtctcatcacacacacacacacacacacacacacacacacacacacacacacaccttccctctaactatatttacaaatgtcagttccaaggtaaaatttctaaagattttccagctataagcacagagcactgaagcctcagcacattcaccatggctcagatgccagtcccatcttccccttagtgctcaaagcccagcttcttccacatcccaatagacatgggggtttgctatgctagttgctccatcctctacagtgtgtcttcctacatagttaacctgtcaaatacccggcaaaccaagaatgatgtcaccttctctgtggattcctttctcttctttcctgggtattaactagctaccctttgtgtcccatgctgttctggacaagtttctaatggattattaaattttgcctgcatttatttatttccatgtgtcttttctatgcccctacaaggaaatggaagacaggtagttagtttttcattgtcacatctccaacatagactgagtcctcatctccgaatcttttcttgacctttgtgaaacaggatagtgttgatgtgatcactgttcccattcaggatttctgtcaacagaagccatggccagtgaacttagaatgtcttctaacactggactagccctcctccaaacttcacatgtagacatcctctaaggtcttcatacagcatgtcagtccaggaagctatcctgcagcccttagtttctgttctcacaagcttggaacatccaatgctgagagtgctggccactaggcatcctggctactaaaggtgtcatcaaaatgcatgtggagtctctgcataacacacacacacacacacacacacacacacacacacacacacacacacacacgagccgaaacagactagaaagccaaggaagatccaggctgccacagatggtgactagagaggacacagggtcccagccatctgtgtaagtgctgttctagagtagctccctatataccctgcagaactgcatgcagctgcctggattcaggtcctcccctctgccccagctggcaacaacattctttgacacacagggaaccccgctgacctgtttcctgaaaaagcctgttttcccctttcctcttaatgcacctattgggcttcttccttggaatctgggcctgaacagttcacaggggattgggaacccagatataacaactattagccaatacacctctgcttttgcctctgtctctcttgtccttcccacagataccggggaagctttttatttcttcccatctgactgaactccccctacattgcatccaatttcttatggaaaataagaaccctttattagggaattaattaatggaatctcttttctgtcgaatgaaggaaactctgatcagatttagctcttggtaaaggagcttggaaacagaaatttcttctccagcactgccctggttatgcacattgctttgccagagactgataatatctttctctaaatgttaaaacctgacttttaggccaggctgtcaagatggatctgcaggtaaacacacttgctgccaaacctggttatctgagttcagtccccaggacctacaatgtaggaggagagaactgactcctgcaaggcatcccctgacctccatgtgtgccctgatgacacacaccatgcctgtacatgatacacacaccaaataactaaataagcaaacaaatagtaatttaattttttaactgaatattgaaggccaccctaaaccatgagggagggagaataaaagactctacagccagactgccaagagtcctagtattatctcctgcaggtggactccaggaagataaaatgaacatatgtcagagatggagaacaatatccagcaactggtatacacagtaactactggtatactggtactctctttctcttaacatccatgtatggtctacaaatctctctggaggaaatggtagcacacataacagttatacccagaatcaggcaaaataaaaatattgtacatttctttcttttatgctatttacaactccccaaataacaggaaaaaaacattttaatttggtattcaacctatttcttttgtcttccaagttcatataattaaacactgaactaatacatgctcactataacactagctaatatcctcatgaaagtacacggctggctaggcatgtagagctcatactttggacatttctgatgatgttccgttatgcacatgatctcatttaacatccaaaaagttagaggaaaataacaaaaacttaaagaatggcagtggggtaagtgttataacgatctaggggaaaatgttggcacctaatcctacatcttagctacagagtactaaatgagattagactgtttgcagactccatgtttgcaaatgcctcctctctttaaaatgtacgtgtggccacaaacttggacacattagcagttgtgtcagtttcttgttgctgttacagacaactgagaaaatcaacttaaaggaagaaatatttatttgaccatgcagaggttccatctgcagtcaattggctctgtgtttgggggactgtcatgagacacaatatcaagtctgaagggcatggcaggggaaagcagctcactccacagcatccaagacgcagagagagagagagagagagagagagagagagagagagagagagagagagagagacagagcctgccctgagaggctgccctgagaggctccctccttcttttttgtccactctgggctcccaagctactggactgtggtaccctgtttcagggtgagccttccactttagttccagtgtcaatcatctcttgaaatagccttacagacacacccagaagttgcttttctaagccctggggcatctatttctcaatctaatctggttaacaatcaacgttgataataatcatctgtggatattcctcaagcagaggagtcatcctcctcaactaaagtcaagcaaggacatatgccacttttttgttcagcttttatgctaaaaacaagtgacttcccatggcttatctagtgccatgctcttctggttttctgtgggtttggtgagggcttagctgtttaaataacccccaccatagcactgaagtgctatctaggattcttaggaatgagaggccaaaaggtctgtacatgctttatcaggtgttagaaaagctttagctgggggcatgattggagtgttgttgacagtgaggtcaatgctagtggatcaataatatgtattaaggtatctttaaactgaaacaagattggttggtgaaatgagtatttgcatgagtagtgagtgctattaactactgagctctctctccagacctgaaacaattctttaatatttgctgattgggtgtgtctagaaactttatcaaacataattgctgtgataacaagaatcatgtgtgcatacatcatatgtatttatatataatatataccagaacaagtatgtataacctgactaccaacatgactgttatcggcctcaaagacaagaaagctgattcttaataattcagttactaaaaccctatgactgtgcatgtgtcaaacatagtaatagtaactgctcagattatattctgctgcataaaacaactcccactggactaatcttgtagcttctataggtcagagcctctaaggggcacaggaagatgcctgtccttactccatcgtgattgggttgccgctgtttccaccaagaaaccaaggactggttaagagggaaacaattattctggtgagaggcaggctgtaaagacttttatctaagccccattgctccatgtgatggagattcagtggtaaggcatataattcaaagaccagatttgaaggatgagagcgtatgcgatgctgagggagagtaaggacatgttagaaatgcaattctccttctttaacttcatcatagcctgaggtaattgcgcctcaggaagaagtgggtggtaaaggaaagaagtcacactctttagaaaactcacttggaaacatgaatgtaaatggactctctgttcataaagcttgagataaaatgcccccaatggcaggtgatggatggagtattgcagcatgggtttatgttgtcagcctgcatcaatgcagcgccaatcagaagagattagtctgacatcgtcaagattcttgtccaacaattataacttagaactcaaaagtgctattccattctatatcaacattgccacacagtaacactgaatagagaataaattgtgtggagaggataatttttgacatgtgagtttaaatataacaatagaagccttttaaggtatcaccgcattccaattagaaagccatcactctgactatatgaatgtgaacatcttctgaggcattaaaaacctcaaggtaaagttgctaatttttaaaagaatacaccattagctcatgaaggagaaaaatgtcacctttcaacaacttaatccacagcttctttagaacattcaatactttcatttgtgtctcctggcctcctctctgcatcaagtcagtaaaatgtggacccatgccaacagataattgagtatctcatcctacaaaacttctccatctccagggattttaggtttagctttgactcctggaaaaacaaattcaggtcagttggcaaagccccccccaaaaaaaaaaatatctcaaaggagagacaaggcttccttgattgccaacgtcatgagtagaaagtcctaggtgttcatctgacccagtaacactcagtttaaaatctacctctggctctcattttctcccaggataacctcatactctcaaaggcctatagttccgacccctgtttccatctttatcccacatggcaccttttattccagccaaagagtgttcattgtccctccccaaatacctgaaggccttcccaactttcacagttgctgttctctccaacctgagcttccttcaacaattgacctgaacagcctcctctctattgggactgaagtcttcctcctcacttggtggccctcaggctcacacactggcatgaatatgtccctcctctgccttcacttcagatctgtcatatattgtgtgatgttttaatcttttggcttttttgttgttgttcttttgaggggccagccacccagctcccaaataaaccacacatggaggcttattcttggttatgaatgcccagccttaccctggcttgtttctaggccagcgtctctctctctctctctctctctctctctctctctctctctctctctctcttatcttttaatgaagttcattttcaagtctatttggaagccttctcagttcagaaatattctaaaaatattttttatttcattctacattccaactacagttctccctcccaccccttcaccttctcccactccctcttcaattgccccccagcccacacccagtccactcctcacaggtaagggctcccctaaggagtcaacatagtctggcacagtaggttggggcagggacaggcccctctcccacacattaagactgagcatggcatcccaccatagggaatgggctccaataaactaagtttaattaaccactctaccttttccatctgggcttttatctttcttgcttctgtattattttttttccttcttactccatggctggctggcagtgtggctttgtggctgcatggctggcccccggcgacctcctttccttgctctttcactgctcctcttcctcgtttcttctatgtatactatctgcctgccagccccacctatccttgtttctgcctcactattggccattcagctcttaattaggaccagcaggtgttttagacaggcaaagaatcacatcttcacagagttaaatgcagcataaacaaaagtcgaacaccttaaaataatattctacaacagtcatatcagtgtttgtcagactgaattaaaatgtcctgtgcttctccggggtcgatgtttaagtgtctttaacccccagcagcaagaaagcaccatgcagccatttaatttagaaacacttccattgcattaaggaaagagggaccttgaattggggagtggaaagtgggaagggttagagggaggaaatggaaaggtgaaataatgaaattaccattttaatcaagcttaaaaagagagaaactaaactaaaaaagcaaagcaatcaataaaatagaaaaatgactacattaaaagcaaaatgcatcaacccatctgaattccttcatgctggtggaataagcccattaacaagggaaacttgataggaatgaatgaagatcttacaaaaaaaatctttaaaagaaataaaaggtctaataagggatgtgatatcctgagatctatttttataaatttggtgctcagaatggatgcattagaggaaaaacaagactagagacaaggatgccagtaagcagactgttaaaataccccaggaaagccatgaaaataaaaatgtgaagaagattaggagaggttgttagttggggtgataaataataagacttggtgattctctcattttgttctgtaaaatcagatatagaaatactgcatggtctcccattcatggggaagcttaaaacattggcctgaaagaaaataaaataatagtgtctactagacactagaagattcaaggagagggggaagaaggaaggttagataagaggatccgaaagcctgttagccagggggagtaggtttcagagctctgtggcacaatagagtgaacaacctattaaaaccacttcataaagaaccagaatagaggagctcaaagataacaaatatcaagaagcagtaaggaattgaaaatattcatgactctgatgttatatgttgtatacatatcgaattatcacccagaagcacataaatatgcacaaattattgtgtcaacttcaagaaaattagcatgcaaataaacttcaaaaaactaagattccatgatttacaggacataagtctgcaagaaagtcaaaatttatagccaaattcttggttttaacagataattgtgcagtgaacctaccctgctgtattatttctgtccaaacaatatatgatctctgatttgatgcccacaaggtgactattaccattctgattcaagtgcttctttttttcttttctccagaatacatcaatgaaattctttgcccactgttcctggcaaaaagcaaggtttcagtgggagttaacttctaatcacccaccaaagtcaatagcaccttcagcctgccatagaacactgcagccaattaggattcagatgtaagagcctgaactctgaggtttgaagcctggctctgccactgaggaactgtggacaaggtagtcaacattttgagcttccattttcttgactgtaaatagtgttcataataatacatctgccttgtgggtgttaagtaaattagcatgaggtgattaatgtagctcccaactcacagaaaatacatcccgagtgcaatagttattggagatggcattacatcaacccaaagtccccaaatactgatcagaaatagtgtttccagtcctctataaaactcacattcctaactgtgtggcattttcctgggaatgactgtctctggagtaacagactttctacctgcccagagaagggatggttaaaaagatttttccctttctaaactgataataaaggctcactgtttgagtttttcaatgtccacgcttacaaaaatcaaagttaggcctcgacgaaccaccaaaacaagtttaaaattgtatcaatctaggaaatgttttaatctgagaatgaagatgaagataaagatgtcataacaaaaagagcatcattaaagctctactgtggccaggcattggtacgcacgccttgaatcccagcactcaggaggcagaggcaggcagatctctgtcaatttgaagccagcctggtctacagagtgactaccaggatagactccaaaagcaatacagggaaatcctgtcttgaaaagccaaaacaaaaaacaaaaaacaaaaaacaaaacaacaacaacaacaaaaaaaaaaaccctactgtgatgaagaaatgacaccagagggcaacttgaattcagagaaagagaaaaaaagttgggaatggaaagtaggaggagggagaaggcatgaggaggagaggagatggaagaggcaagaggagaacagaagtacaatgggggggatggggggagggtgtgcgcatgcgcacttgcctttcagtcctgtcagcattctgaagacagaatatgatacaaaataatattttagaaatgtactgttgagtttgtgacacacgtgaccataatatgcatagctataacacaaaaggagagtgaggaatgaggtggtataggactgaagtctctatatttcaccggaattgagattttataagtttaaagtagatttaaataatttaatgtatatataataagctacagaacaaatggaaaatcattttagactatactctaaaagttattaaagttgaaatattagaccaggaaaatccacttagtggaatagaaacaagtaaagtagagggctggggaacgtagctcagaggtcaaacacttgcccagcctgtactatttgattgatcccattgctgtgggagatgtgggagaaagaggaagcaaaaaaataagacatgagatacacataaaacaaaatgtaaacagttataaccctaaccatattggtaacagcaaattaaaccagattcaacaatgttatctaaatgtgaacattatcattatgttaccaatcaagatataattgtatggtgcctataatcgatatcctttgcattcaaatgcatagatgaaagcaagatcttggggaaagaaatagcacatgaatagaagctctaggagagttgaaatgaacacactaatgtcaaaagagagaaaaagaactactcatgaagaatataatgataaagttaattcattaagaaaacctaaattgcagggcgttggtggtgcatgactttaatcccagcactggggaggcagaggcaggcagctcatctgtgagttcaaggccagcctggtctccagagcaaatgctaggataggctccaaagctacacaaagaaaccctgtctcggaaaaaaataaaaagaagaagacctatgtaccaaaaaagacccaaatgacattacccaaaaatcaacacaaatatagaaatagataactaaacaataacacttgagacttcaatcccacacttttgataatagatgggacaaataatctgaacagcaacatggaaatagataatgagaaaaagcctacaaagctactatacccacagcatctctaggtgtctccagaactctacacaatatcagaacacatgtattgtttcaggcagctagaataagctctcagccatgagacaagtctcacaaaaacataaaaagactaaaaacatacaataggattgtcacaatagaattaaattaaaaaccaagagctgtaggggatgctgtagtgtaggggatgctgtagccagcccgtcccacttctgacaccagataatgtgggaaattaccaatatggagccaggtaaaaacacaagggaaaagccttacttacagagcgacctagccagccggcggggcagcactccatacagcaagtcaaagatgaaagtgaaagcaggctgctacataagcatcactcactctacatcactctgaccacgcccttgcaggcgtggtcaggcacacctgtagccagcccctaagcagaagtagctacagcatcccctacactgtagccatgcccgattaggggctgactacagcatcccctacaaacagcataaaaatgcaagacattcacacacagatcaaaattaaacaactcttaaccaaccaatgaatcagaaataaaatcactgggaagtcaagaaaaataagataaatgaaagagaaatacaacaaatgtgttatatgtcagatatctatagctttaacatatggtgtgttaaaaaaataaagattgcaaatcaaatagaaactagagaaattatacctaatcaagtaaaatgaattacactaataagcattaggttaggaatggataaaacagagactatagctatcaaatactcaatgacaacaattttagttatttaaaaagaacaaaaaaattggcaaacctttagccaaactgatcaaggaagatgataaagaattaaattaaagaggtaaaatcagggtttgacgagatgactctagttaaaaacttggtgcccttgcagaggacctgggttcagttcccagcacccacaaaacacggctaacagccatctgtaactccagttccataggatattatgccctcttctggtctccttaggcattgcatgcacatagtgtacagacaaacatgcaggtgaaatacccatatgcataaaataaaaagaaattaatcttaaaaaacaagaagcaaaattattgcagaaataaaaggggcataaaaagatgccatgagggctggagaaatggctcagaggttaagagcattgactactcttccagaggtcctgagttcaattcccagcaaccacatagtggctcataaccatccgttatgagatctggtgccctcttctggtgtgcagatatacacaggagcagaatattgtatacataataaataaataaaatctttaaaaaaagaagaagaagaagaagccatgagcaactgtcacaaaacagacaagttagaagaagtggacaaagtctgacaaagacaaaaattcccaaaactttctcaagaaacagaaaagcctaaggaatgcaaaacaaaaaagtaaaatattcattttaatacccagaaagtaatacccaggtctgtactttttatttagtgaattcaaacaaatactctgcaaaaaaaaaaaagtttataccaatatttccccaaatctttccaaagaggagaatggaaaaagacaaagatgttctgtgagaccagtattacccaagtaccagaacaagcatcagactaaagtgttaaaaatacacaagaacctcaccctatttgtttgtgaatatataatcaacactcctcaacaaaatactaataaaatgaatctaatatgtgaaatgtattttacagagtaatcaggtaagatttgcttccccccatgaataccaagttgtttaatactcaaaatcaataaatgcacaagtagaataatcaatcagtgagtcagttgctcaaaaagattaaacaagattgacaaacccctagacaaaccaaccaaaagaaagacaagacacaaattactaaaataagagatgaaaacagaggaggttatgcaatgaaatagagaatcattagggggtactttgaaaactggttgtcttcatcaaggtttctattgctctgataaaacactgtgatccaaagtaacttgggtttgttccttcttacagctctcaagtcacactccattgctgaaggaagtcaggccaggaattcaaggaagaatcgtaaaggcagaaattaaagtagagaccatggagaaacactacttactggcctgctcctcaggaattgttcaggatgctttcttatagcatccagggccacctgcctggggctgatcactcatgtctgttatggggattcgattctttcccatccctttacatttagcctttcttattcacttctgttcatggtgtactgtacccacatagacacaagttatgggaggggatgtaaagctaattaatttccagttccagccctgtcatggaatttcaggtttgggtggtggatgagtgcataaaatatatcaggcactaaaagtgtaaagtttaatgtgaaacttcacagctcatgttccagatatcaattgcaactgaagataagttcattggctttgaatctgactaatttggtatgtgatgtgtttatttacttgcaaatttcataataaagattttaagttttagaagaaaaggacagcaatcacatcatctcaatccttatataaaaaacaacctttgataatgctcaacattctttcatagtaaaagctttgaagaaattacaaattaaagcacacacttcaccataataacagccatataggacaaacctgcagctaactgtactgactggttttgtttgccatcttgacagaagctagagtcatcagaaaagaaggagcctcagctgagaaaaatgcttccatgagatccagttgtaaggcattttctcatttagtgatcaatagggggcagcccatggtgggtgatgccatccctgggcttccggtcctgggttatataagaaggtgggttctataagaaggtgggcttcccaagccattgggaagcaagtcagtaagcagctctcttccatggcctctgctcctgcctctgacatcatgccctgtgtgagttctgttctgacttcttcagtgatgaacagcaatgctgaaatataagctaaataaaccctttcctccccaacttgccttttggtcatggtggtttgtcacagcagtagaaaccctaagacactaacattatacaaagtcagggaaagataaaaaggatcccctctgttctctggaatgaatgagacaaatgtgatcctctcacccatcttactcaatatagtacttgaagtcttagccacaataagagacagaaataaaagggatacaaataggaaaggaagaaatctatttacccctatttgcagctatgatcttatgtttcaaatatcaagactcctccagaaaactctttctgcaaagtagcagaatgtaaaatcaacacacaaaactaaagaactcctccgtctaccattagcaaacatgcagacaatgctaatggtagacaatgaagtcaagaaaagaaacacatcccaaaaaagaattagatgcctaggaataaacatgaacaacaaggtaaaagattgccatcatgaaatttttaacatactgcagatagtagattggcagaattttgtgaaaatggctacatcaccaaaagtgatctagattcaacaacagtcattcccaaaatcctaatgccattctttacagaactagaaaaggaatcctaaaatttctataaagcacaaaaaaaaaacccaaatagccaaaacaatcataatagaaagaaaaacactggaacagaagagaggacccagaaatgaacccatatagctgcctgccacatgtgatttttgacaaaggtgtcaagagtactcactggagacaaggcatcattttcaacaaacggtgctgggagacctggatttccatgtgaagaagaatgcaaccagaggccccacttatcctacacaaacatcagttcaacgcaaagcaaaggccttgttttaagacacaaaactcagaatctataaaagaaggaagaggaggaggaggagaaggaggaggaggaggagaaggagaagaagaagaagaagaagaagaagaagaagaagaagaagaagaagaagaagaagaagaagaagaagaagaagaagaagaagaagatttcaaaataaaggcatagctaggcaaggggtttttgaaaaggactttagtagcacaaaaaaatgcacctaataactgacaagtggaactatatgaaatttaaaagatctgagaggcaaaccaactctcaaagtgagcatgagggaaaatgtctacatcagaaaggattattacctaggatataggaagaactgaaaattaaatatcaaagcaatgaatcatcagaccactaaattgggtcacacacacctcccccccaaaaaaagacaatcctcaaaccaagaaatacaaataaccaataaatacttgaaaatgtgtttaacatccttatccttcagggaaatgcaaattaaaactgcacacgcattctatttagccacagttaggacagctcccataaagcgtatgacagcaaatgctagtcaagtggtggagaggcaagaggaacccttatacatggctggtagaaatgtaaacttgtgtggccactatggaaatcggcacggaagtttaaataaaagagaaagtgagaacagaacctctgttttgggggccatattctccaaagactcttagtaaacatagcacggagacaattgcatgtctatgcttgctactatatagtcacaaaatctaatgaacagagccatcctagatgtccatccacagatgaatgaataaagaaaatgtgctacatacacacaatggcagcttatgctgccagaaaggaaaatgaaatcatgacatttgcaggaaactggatgaaagtggaaatcaaaattgtaagtaaaataagccaaactcagaaagacaaataccacatataaggaaaactaaatctaaaactatacatatgttcatagtacatatttatatatgtgaaaaaaggtcccaactggaacgtgttcatgagaggaggggaacgccatctttacaaggtgggtaatatgataatagaatacacacaataagaagggaagcggctagatggagaggggaagcgatgagaacaaaatgcaatagcacattcatatggagatgccaggaacagacccattaccttgtgtgctagcctaaaaacttaatttttaagcaatagaaaaaccacgtatctagctagacaaaggtataatctcaatatggaatattaatccctatggaatttctttgggaatgataaaaatattctagacttagattgccatgatggttgtacaagtcctacagaccaaagaagccctcaaacagttcatgtaaactggcttaatatacatgatgatttcaataatgatttttgtctgtaacaagaaccacgtgggcagagaatgggagaggatgtgtcatagatagaaaacaaccaaggactccagactccagactcaacacaatcattgtcaaaaccccgatgaagaccagaaaccgtaaaaagatccatgggatgggactgtagacggtgagaacattggcaggaaaaagctgaaaacctaacttaatatcagacccacaaatggcaggcggagacgtgcattctggtgccggtgctgagggacaagggaatgttaccttcactctgcaccatttcctcccccaaataaacacagcagctttctcaccatgagccgtgagcaggacagaggagatgtccttcagagagaggactttgtaaaacaatctcccccttaacaagtgcaccccataaacagtttcagatttgtttatcaccccttcacacagctgcccacattcctctacaaacccatgctttgcccatatggataaacactccaaaaccctttgctttgagaatagcagtttttatttgcactgaaaacagaaaaaagaaaacactgtgaaagagatttgtccttcaactttccctttctccccagcccctagaactaagctaaactacattggcctcattttcttttacctcccctaagaaataccaccagtcgtaaatattgtagctgtcccctagactctggctgacatttcatgcaaaattcatttcagagaacatccaccttttagtgatttatagccaaagtgttaaggattttggaaagcaaaagatttaaaatacaaccaaacaaagacttcaccttgtcagtcgccctgtgatctttttccggtgcgtggtggtgcattgcaggcatattgttctaagattaggaccagaccagaacaaaacctttatgttctaatggaagggatttcacagtcattgtgtgaacggagaatgtctgtttgcctgcctgccggccggcctgccatactctcaacctgagaaatgaacatttcgatatgggaaagataccacctcttcagggggccccgtcataagtgaggacaagatgcgactgcagaaatcttagtgggaattcgagtgagagttgctttaatagaactgaggatgaacagcagggctaagaactggagacagcctaaagactcaagctggaggacctgctgaggccagtcagtaactgcctatcagtcagctcccctggaccgcagtcctcatttacaaggcagagatcgtcacattaacctgtcttgtgatacacaggataggttaagagatgagatagatgtcagcatccaataggctacagaaagaggccaagtcacacaccaggcacggagcagtgctaacagagagcaatttgagagtaactggaataactgtatttccatgcacacaccacatacccattgtctcactctttattttaaagattcaggatgctcgagaagccctgactatatgcatctatattcaccatctatgtgcgtgtgtgtgtgtgtatgtgtgtgtgtgtgtgtgtgtatatatatatatatatatatatatatatatatatatatatattcacataactgtcctacccttgacttgcctgtcactttaagtagtcagccatttaaaaggtacttgaacacctgcagtacagggaaaacgtttcatttccctactagaaaaacaatcaagcaaatttaaataaatcacctccatgtatctcctgcaatggaccagctgcctggttatttgtccctgaattgccattgcatttatctaacaaaagcacaatgttctgatggcattctgtacaggaaggaggatgctgggagaacctaatcagaaagaggcaacttgcctttggctgcaacttaagaggggatcttgtttatacccattacagcatctctctctctctctctctctctctctctctctctctctctctctctctctctctctctctctctctgtgtgtgtgtgtgtgtgtgtgtgtgtgtgtgtgtgtgtgtgtgttctcttccacattcattcattcatttttctaagtgccgccccagactagcagcagcagcagccttgccactaaaggttattagagaaagaaagtcccctccccagatctcagttagaaagggtgggtgaaactcagaagtctatgcactcaccatctctcctaggtgattctgaatcctactcaagttcctgagccacctggtcatgaaagatgatctcacctgtctccaacctcctttccagaaagctcacaacgtctgttttaccaggattggggggattctgtttacatttgtaaagctctgagggaagctaaaggtgccgggctcacgcggggtttggggtgtttcctgcttttgtaattcacaacgcagaaacaccagcatctgctctctctctctctctctctctctctctctctctctctctctctcctctctctctctctctctctctctctccctctctccctctctcctctctccctctctccctctctcctctctccctctctcctctctctctctccctctctcctctctctctctcctctctctctctctctctccctctctctccctctctcctctctctctctctctctctctctctctctctctctctatctcctctctctctctctggaaacagaaacaaagagaagtgaggagattatacacaaaggacccttccaggcaatcttaaaatgtgggcctgaggggaaaggcggctcacagggaggagagcctgctccattcacaggcgtcacctagtgggcgctgcagagaggaaaggcctggaaggctgtcaccacacttccaacacaagcaggcattgtaggtacaaagaggacgttgctacagagaaaaactgctggaggcagggaggagagaggcacagagcacacaccaccgggcaagctacccagggagactgggatgctaggaagagaaaaaagaagcttcaggaagagcgtactttaacggctgagccatctctccagcccgttaaaggctaggctcacaaccaagaagatcatacttaaaaatatcataataacaaattctgtgacagttatcacatcatggccttgaggacaggtctatggttggctccagctaccacccaacttttcctggatcttctgtatggtaagtgcagtaccattaactcaaccctattctgaggacagaacattcttgggaaatgcagtaccattttatgtgcaactcagagatgactcccacaaaggtaaaccagcatctctgatgccaagagacacacccgatgagccggcatgttttcctgggaaccaccatctctccatgatcctcatagccattaaatggatgatatctcatactaccaaaatgaaaagtccactctcccttcccacaatttacaaattaaaaatggaaaggaatatgaacatcttagtgtactggcaaattttaaatatttgaagggaaaacaatgctttaaaaaagactcttaagatggcagtcccaggcaggcagtatgggcttattttgccaaagaaagcacagccattgcaccgagttttgcaaaaaccatcagtatttgggaatgattctggtgatgatgatgagacctccgtgaatgaaagccttcagagggaagctgctaagaagcaggccatgaaacagggcaaactggagattcagaaagctcttgcagaagattccatatgagtatgacagcatctatgatgaaatgcagaaaaagaaggaagaaagtaatcccaagctgctgctagggaagtacaggaagcccaaatatatccacaacttactaaaagcagtagaaatcagaaaaaaaaaggaacaggaaaaaaagaatggaaaagaaaatacagaaagaacgagagatggaaaaaggagaatttgatgacaaagaggcatttgtggcatctacttataaaaaaaaaaaaaaaactagaagaaagagctgaagaggtggaaagagaaaagaaggtggctgccctggaagcaaaactggatgtgaccaagcagaaagatcttagtggattttacaggcacctcttaaatcaagccgttggtgaagaagcagttcctaagtccagcttccgtgaagtcaggactggaataaaagaagagaagcctaggggttactctgatgaagcaaattcagagggcagactgcagcagaactgccttctccaagctggtggaaaggggaaaaacccagatgctgacagcaattttgacactaagagcagtgaggatgatgaaagggaagaaaataaagtcagccacagaaggaagaagacactaagaagtaccccaagtatcacaagaattggacccactcacaatcctctagtgaagaaagaggacatggtgttaagcaccattccagaagccccaagtcaagaggacatgaccaaaagggaagtcagcagcaggacaggcaggccagagagcaggagagctgtcagatggaccacagccacaggaaagaaaagagttctcacaggcacagaggaaccaatcacaaagatcactagaggaagagacatgagcaagaagataatctgagggggagcagaggaaagacaggacagagaatggaaaagggagaaatactcctgtagagaacaagacaaaaacagacaacggaatgaccacgaccaataaaatgagaaagaaaagaaaagcaaaaaaaaaaaaaaagaagaagaagaacacatgaaaggaagatatgaaaacaatggtagatacagagagatggaaaaacaagaaagaaattgagacagaagagaaagcagcccaagatctagaccaaaggatgagtttcttgaccaggaaagatccaacaaaataaaaaacatggaaaaggacaatggggaccaagagaagccctctggttctgaaacatcactagcaacaaaacacagactggcagatgaaaggcaggagaagagcaatgagcaagcgaagcctcccccaccaccaccacccactccccaccccccaccaccacccccaccttgagcaagtttgcaaagtggagcaatgaggaaactgtgatttcatcgagagacaggtacctggccagacagatggctcagattaatgcaaagacttaagaggaggactaatgactgccaggatctggagttccttgggagcatagaacattgtgaaccctggaacgtgctttaagaaagcaaatgggtttgtgaacagtgactggagggtgttttttaaagtgtattttcaaattttgtgaagtcaaaagtcagagctttgggggacttgtgagatagttaactgtattaatttgttggttgtactcaagaatcatacagtgttaaatcttcatgtagattctttgtgaagaaaattgacttcattataaccattaaaaataactctaataaaaaaaactcttttgaaagagtggctacgttttagcaggctataatattagatacacaaactcacattgggaggctaagtgaccctccctctatggaaaaaaaatagctcttcaaagaacttcacttatgacccaaactgcctcatacttaattgaaagagcacaagtcttgaaaacagatgcaacagagtgcagattcctgcccccttttttctgacattaggggatagtcaccttgctccactgttgacagggattcagccatctattgctgatcttggtgagttgttgattataggagaatataaattatctactatgagtatttaaaaatcagtaagatgaacgcgtcttcacagtactcgaaatgccttgtgcagcctcttccacctcacactacccccaggaagtcacgagatttcttctctgccctgagtgtgccaattctccagactaaccagctccagtctccaagataggcgcctgctatattcatccaccaggcagaagtcccgtaggaggagtcagggaccaggcctcacttatgtgttgagctctcccattccaagaccttacatcccaagtgttctcttgacctttgatctggacactcacccatcagctcattttgagctcagtggtcagtgctttctgaccaacagtttctgagcactccctggcccaacttactcttgaggcagaacccggtccctttgtttccacatttgcctctgtccagcactgtatccacccggtcaccatctccaatcaaggtctctatgtgaagtctgttggaggtgaagaagctgtgccctcaggctgaatgaaaaagagttggaggagaagacactgccttggagaaaaggggaagattacaaagccaggggcataagagagaaatctttggagcgtgctggtgcaccaacagtgaaaagttaacctgaatagaaacaccagtggtgtttgttccattctgagtcgacctccttgactagaacacctccattgtttttcacagcgtgcattggtctgcacaggtgtgctaagtttcaagggttaaggggtctggggtattaaatacaataaaaatggctgtttctttccttcccacattcactcgttccagctctccaatctgccctagaccaacaactctctcataagtccttggagtcacttaaataatgccaaattcacacagtcaaatggaaccatctggtccacagtaaaaattgtgttctcagcatggcattacaagctaagggaagggggagacctagcctaagctggagagagttttgcagcatgctagagacacctgatcagtctagttaaatatgtgtaaaagtatgaagtagggaggaaaaatgatgtgaccattcatccctatatatgtgttctcaatgtggcccccacactaactgcatgaccattgcctcagaacctgctcaaaggcaagttttcaacctccagactaactcaatcagaaatcaaggaggagagtacaggacttgagagagaatgatctgtccagatgttcttgatgactttgataactgctaaattcaaccccctattctctagtacatggtttctcagccttgactggcagtggggcattgtgggtctgtctaacagcatccctggcctctatccaccccatgccagtagccactcaccctctagacatgataatttttaaagtctcccaacattgtgacatgacccacagaggacaaattatccccatttgacaacaaatgtttccttttatgactggaattattatggacaatagataagtagatcgatcgatcgatagatacatacatacatacatacatacatacatacatacatacacagatagatagatagatagatagatagatagatagatagatagatagataggtaaatagatagataatgatacacaacccagtctgaaaggtgtgcttttgtataatattcaaggaaaaggaaggatagcttgttatttgtttgggtttccaaatgacctgttctatatacaaataatggacatgacaaatagaggacttaagaaaaaatttaattatttcttttcattaaggactttactccaaccttgtaggagaaggcagaattctcatgtgtgtccctcttaacaagtctatcagcatctaaacattcggtgtcagcatctggacagggagctttatgaccactgttgtcactgtgtcctctgcttccattatcgaaacagctttttaagagagcctggaccatccataggttctcaccattcataggtttctcagtttaagctgtatatccagatgtgactgccaggcattttctatgccccaaactataaccttctttgccattttaacaagcaaaatcttcttccatcagctgctggatgaaggctctaggatggcatataagttagtcatcaatctcattatcaggggagggcatttaaggtagcctctccactgtggcttagatggttagttggtgtcatccttgtagatgcaggcccaccccagggctgaccctcagattctacattttaggacatttctccacatgacttaactgcacattaaaatctgcacatcaaaatcaccaactggaccatcgggacgataataaagattagaatcaaatctttgcctcatgcttcctagcctgctgcaccatttagtacttgttgatgtgttagttcctcagtgtcattgtcacaaattgctatatactcagtggcttctaacaaatgcgttgactcggagttctgctgttcaataatcaaaaactgctatcactcaaagggatcaagaccacgctgggaaaacccacagagatagctgacctgagcaagtgggaactcacagactccagactgacagctggggaaccagcataggacagaaccaggccccctgaacgtgggtgtcagctggggaacttgggcagtctatggagccaatggcagtgggaccaggatttatccctagtgcatgaatgggctttttggagctcattccctatgcagagatactctctcggcctagatcccccacgggaggcctcaccctctctgaggagtggatgggggtgggatggggagatggtgggggatgggaggatgggagggagagggaactgggattgctatgaaaaataagattgtttatcatttaaataaaaatttaaaagtctgctatcactggttatcggggttctgcctctcagcggggaggtgggctatagaaagaacatgtttccttccacacttagtgaccaggtttacccctgcggcccttggcttgccttccttccagtttcaaagccaacatcacggcatcttccagtcatgccccatgacctagctccctctttcacttaataaaaagggtggcattactgtgagcccacctaaattaaccacatcatctcagcctcagtatcactagtctaattagagtctcaaagtaccttttgccacataaggcagcactttgttccagaggttagggcatggatggaggaacagggtcactactctatctgtggcagttaactggtgtttgctgactcctactcagatgggataactcctacttctcaggaatatcggttccttgcagatatccggcctcctgtgagtcactcatctccctgccgttgtctcctttcccagttgcatgtcaggaccacagcagccagctctggctcccttccgcggcggctcgccatcacacctttcagctcagtgctgcatgagcgccttggtttcagttcacacagctgtctctcagacacggtctgtacctccttctgcggttcttcctcccactgccttcccaccaatctggtgacccaaaaaccacctcccttcctttaaatcttcctgaatatgaattagcctttttgaaacgactgactggaccattcttagtaagctatcacctctccactccccgtcaagctcactatgaacaatgggcagaaaccaccagacggtatattgtgctatgtttacaacacttttccaaggagtctacgaacacgtgtgaacagggcttcattaatttttctccttcaggatgagtggattaaaggactaaagacacactaacttaactctttattgaaaatatagactaaaagaagttgtccagacagtgacagcgtttttaacttgaaattctaactgtatttcttccactgatcagtgtttcaccacagtgcctagaggcagtgagatttggggaaggctgggatattgacaggaatgtgtgaaagcattctatgttctgaaaggggccaaaacatgacgacagccagcataaactcaaaagatggcatggtaagactcaaaggaaatacaaagagaaaggggataccactctgacccacacagtggggcccaaagtatccccaaagtggctcagagagacaacagacataacatgaatgaaactgaagcttcattctgctgtacacatgaaaatactgatgataacaatgacaatacacacgacctacatcactattctatcccatcatgtcaaaagactcatagccttgcctcaatggccttgctaccctactctaactagccgctaacatttaccacactgccacatatgctgtctcagccacttcagaatgcccttctcctaaatacttcagcatatgcttattaacaatgagtagagcgtgggggctagctcaacagttaaaagtatttgccgccctctccgaggatcttagttcagaccccagcacctacatcaggcagctagctcacagttacctttaactccagcgctaggacatgtaataccctctttgggccacctcaaagagaatttcactcacatgcacatactccacaaaaacgcatgcatttctttaaataaaaataaaatgctgggcagtgatgccgcacacctttcagcccagcatttgggaggcagagacagtggatctctatgagttcaaggccaccctggtctacaaagcaagtcccaggagagccagagctgatatacagggaaactctgtcttggggcggagagaataaaatgaatctttaaaaagtaggggtatgctttcataacgctaaagtagtgctcaaaatcagaatatttaacaccaaagacaatagcttaacctacagttcatagtccagtgctgtcaataatgacttctaactcattttccctcaccactacaagaccctgtcacgaatcatacattcagttgtacatgccatacctttttaatgttgtttttaaatctggaacagttcacagcctttcagcagagatcacctgccctgtagaaagttcctcagtttgggcttggaagatgcctccttccagttggcttcaggttacacaggctcagacagcgaacacaggaagttacagtaccgatgtagagcagagcatctggagccataggagcccattgccacttatattaacttctattagtagtgttgtccagtgtctccactacgtgtctgctgcttttcccctttgcatacaccatctatagagagacattttcagattctgaaagtgtgaaggtctaatgtggagcatatagcaaggactcaagcctgggaccatctttccctgtgtgtgtgtgtgtgtgtgtgtgtgtgtgtgtgtgtgtatgcttatatttgtgcattgtgggctgtgtggatatgggtgtatgtgcacgtgtgcaaatgtgtatataaagacagaggtctatattggatgtcctcctctattgatttccaccttactttctgatacaaggtctttcactgaacctggagctcattggggtagagtagctggtcagcaagccacagggatccccatgaatcagccaccactgtccccttccaatgccagagttaagacacaggcttggttctttatgtgggttccgggaatccaaacacgggtcttcatgcttgtgtgtcacatgcatttccaattgaatcatcaccccacctcccagtgactttagaagacttcttttattttttacctataccctccttcctcatggatctacttcagacaagaaactttttctctctttacttattccattatctccaatacagactcctgaggtcgtattttattcaatgggttccttctttctgtgttcaaattttcccagacttggcaagccggaggccattccagatggttcctatcatccttttgacatggttctatcactttttatgaggacatctttactttctggcatagcagtgtattctcactaacctcttttttagtgtttaaatcagaatgtatccaaattacaaaaattccccacttcaaataagatgacagtgaactaaatattttcttatagactgacaactttgtttttaaataaaggaaccaccatttctatgatcatgtgtatatacatgccctccctcttctgacaaaaacaattaaaaccttcagcgtatgtttggttatagcattcaaactactaatgattggctttattaattctgtacattttgctgagctatagagaccagtcacaccgttgtcacctctattaagggagtctaattcagtcttatgcaggttccccatttgtcagacctgagtcagtgatctctctctagctcgggtcagctgattctctgggtttccccatcattgtcttgactcctttgttcatgttatcacttcaattgtactccaggagtttggtccattggttggttgtggatttcttcatctacttccatctgtttttggaagagggttctagcttctctgcagttgtggattgtaggctgggtatcttttgctttcattgtttccattgagaagtctggtgtaattctgataggtctgcctttatatatttgttacctgacctttctcctttgcttctctttgtaatgataaatctttctgccagccacccgcttctgctgccacattagggcttcaagtaacagagacttatattaggtacaatacttctggtcaatgactaggatttcttgctagctcagtattaattatcaaccataatcattaatctatatgtttataaagacttatctggtcgaggatgccggtggcatgtgtcctcccttgctgcactcacatcacgactccacagagaagaggggggaaggaagaggaagaacgtgatttcctgcttaatcctgcttatattctgagtctgcctattatgtcacttcctgcctggatcacaagacttctttttactacatttcccagaatcttcctctgttgggagccaaagatctcagggcttggcatgagatcccaggccattcttggtcagccacatagttgtatattaacctttacatagcagctccttagaacctcagctcaagaaaagaaacaacttgacccagtcctccacccacaggctcagtaacctaggcaacccttcctggacctcttactcatgaactctttaccctgccaaacatcctttctgtggcttcctaatatcctgcctacactaacacctaatatacaaacaacccattctacccctccccatatcctgctctactgactatataagctagcctgagaaaaataaagtttgccacttgatcagaatcctgtctagtggtcattatttctatgtgtcttgtccccattccctatccctgactctcttgccccaggttcatgtcatgcaggtcgggacaccccttgactcctagtcccacctaacttgcttctctattggccaacagtactttatttatcagccaataagacaaacatatacacagaaggaccttccccatcatctcttaatattatttctttattctgtatgtttattgttttgattattatgtggtaaggagacatttttttggtccagtctatttggtgttctataagcctcttatattttcataggcatgtccttctttaggttgggaaagttttcttctatgattttgtggaatatattttctgtgcctttgagttgggcctcatctccctcttctatacctattattcttagattttgtcttttcatggtgtcccagatttcctgcatgttctgtgttaaggatttgttggattaaattttttctatgatgaatctatttcctctattgaatcttcaatgcctgagattctctcttccatctcttgtattctgttgtttatgattgcgtttgtggttcctgatcatttacacagattttccatttccataattctcttggtttgtgttttctttattgcttctatttcagatttcatgtcttgaatcatttccttcacttgtttgattgcattttcttggttttctttaagggatttgttgatatcttgcaattttttgttttcctccatttctttaaaggaatttttcatttcctctttaagggcctcaatcatcctcataaagttatttttaggtcattttcttttacttcatctatgttgggatgttcagatcttgctgttgtagcaccactagtttctagtggtgctgttttgctctttatattgttaagtgtgttcttatcttattgtctatgaatctcttcctctaatcagcataggtagagcttgtacttcaggagttctctttttctccaattggtatagttgggggctgtggctccattgactgctcctttgggcacgagtagagcagagcttttggtgaatgctcctcctggtggaagtgggcctaatgctcaggtggtcactccttgaggtgcaggtggggctaaagctccagtggacactctttccattggaggtatagatggggctgagggtccagcggttgatatagttgtcaggtatctcccaccaagaaatggcagtggatgctggctgggacacaggtgctctttcccagaggaacgttttgcaatagtttctggaagctactgctagaaaccactgctgtcatttcaccgggcattcactccttgctcctgggcctgaggctggagcctccctctgacgctgctcccaggtctggggtttatggctcccttaacactgctctgggcctgaagctctggctgtcctctgatgctgctttcaggctgggattcgagcctctcacttgcacatttcttaaaagcaaaggcatgaggtcactgggtatggtgtaacacatggtggtgggtcttaaggacaaactaagtgtccatccacaagggaagagtcagtcaaatatagtggaggcaatggtcattgcaaaggcctgaggatcatggagactgtggagttagtgtctaatagatagaggttcagtttggaaagatgtaaattttggagacagatggaatagtaaatacagaagaatgtgaacatgtcttgtgctaacacctccagattgaaaatgataaaaattataagttttttcctgacagggtcttgctatgcacctctggatggcctacaactcctcatattaactaggcttcctgagaactcacagaatctacctgcttcagcctcccaagtgctagaattgaaagtcctgaacaactacattcagcttatattggaagattcttattgtggatattttaccacattttttaaagatttttaaaaatgaagtgaatccaagatacagagtaacttacaagagttaaaaaaaaaatagtgcactaattgccagtcagtggtgacgcatgcctttgttgcagcacttgggaggcagaggcaggcagattttgtgagttagaggccagcctggtctacagagtgtgttataggagagctaaggctacacagagaaatctgtctcaaaataccaaaaacaaaaaagtggtgacctaattatagttatagcaacattaatctgaaaaacagaattgaatgatgaatgaaaaacagaaacatgttctaaacaatacttgatattttactagaacacatttcaaaagatttgttaccagcacattagcttggaaacttactagggctaggggaccaggaatagagactggaggataagggggagatgacagcatgagaagggtgttccatgggccaatgatggatgacgacaagtattatgaactgagaagttttcactttcaactaaaaagaaattgcatcacaccataaaaaccctctgaaagaatagaatgtctacagtttatattttgttatttccttcattggaggtggagtgaaatgaactaaagtagattttattcctaatgttctggatcttggtgtatcctggcaaatggtgatttacactctggctacacacattgcaaattcatctgtgttttatgagcttttaaacatccccagcgatctctcattaccacacatttcttctttcctctttttccctccgttccatgtggagccagattaaggggtgggtcagacaagagttaccgagggtgcaactatttaagaggtgtgaaaaatatcactagaattatagcaagatggaaaaattatttttcctagcactcttattacagaaagcactttgtgagggcagaaagaatccagtaataaattgtggggggtggggatgcgtgtggcccctctcccagggaaatgtatgaataataataaaatgtgtttttaacactcaaggccacaggagataatgcagagttagccacaactgcaacaaccattcacagttcatgtataaacagggggaaagcctcaaccatttcagtgaataaatacccccacttaatccacttaatcacagcgaagcactcttgttgttcatattgagcaatcatctttaagaccacagaggagtttggggaggtggaggagggagagggagatgttgaacgtcttgcttttcctaaatgtggcctaaataaacatgggatgcgtgtgcagatgttcaagactgaccaccgccagataatcacctgatcctatcccttaagaaaggacacacttcagaagtcccttcctttcccagtgttgaagcttgtgaatccctgtagcagatgttgagtgaccagctatagccttcctaccttcgttggttggaaggggtagaaatggtgaataagggttactatgtgttccatttgctaaaggaacaaagctgctgcctggccatgcaaaaaaaaacaggagtctgtacatcaccctttaaagggatactttggagaaaagagaccagtgctggttctgggaggtgtgggggttgatctcatgtaactcaagaagacctggaactcactaagtgcccaacagtgatcttgaacttctgatcctcatgcctcactctcagaaacattatggttgcagatgtctgccactctgcctggctcactagtgtctttttgaaatcttaattactaagaaaaggaaatggggactctaaatctgggaggcaatttgggaatatcaggagagttgtctacctgagtacatctctgtggggcatctggcaccccataattctgtacccactgttctccactcatccaacacactggctcaactttaatctgagtataaaataggcatctaaaagcttgcttactgcttgttatataataaatggagttcaaactatattttcacacatggattagctgttttccttaatatcccaattttttcacttactccccatattaacctgtttaataacctgtgtcgtgcattaaacagtttgcgatcctatgctatgctcattaactcttcagaatgacttaaaagctgaaacacaaagggggaaaaagaagtctgattcgatagcacattttggattcattccctcctgaaccaatttgattggcaggtactgcagcagatacaggagacaccttatggtgccaggcctgcggctgctggaatctaatagccagccatgtggtttcctggaatgagagctaagctaagactggggcatccatgtggaaaagccaccacccatttcaaaatgaggacattggcacacagttcccaaggtcctttgcagctttcaggtttctcttattcattcttgaaagtcatagtgagtcctaatgtttttaaagacatcgaagcactaagtgagacattcttcacacattatttctcactcactctcaagaccctcattaggctcttgtatcctcggggtcaagagcagaaacctgtgacatacctttcctacaggtcacaagggcagatggaactcagcccagaccttcaggaaggaaagtctatctttgctctgccgaccccaaagtgtgctcctaattatatacagtacttgttccaggttgtatctgtgaccctctgctgccaagttttagtggtaaagtcccccatggtgcaaccacttaccttctctcccctgctagtcagcaaggcctgcttaaagggttcatttctatcagctttggtggaccaagccaccctggggtaggatctattcccaagagggtgggaaacaaggtgactgacaacagtagaccaagtgcttctacaactttcccagcagagccgagacaggttctcataatttacatgctccatttgaaatctagatgctgaagcaccagaattatacatctgttcccttgactttttaaccaaagagtgctagtttattgctgagcttaaggataaaagaagcaagaaatgaaagttgggttgagtttttttcaggtttcctcctcgctaagtacaatcagatgttggatcctcagcctgacatggagtggatgcttggtttatcagctcgtttttttttttttttttttttttttgaggcaacgcttttcatcacaaagaaaaaggaaaggccctatacaaatagcttcagttaaatgcatcaaacagccccaatattgtggtgccaaaataaaataaaataaaacaggaaagatatctaaactgatttatgaggttttgtggggaaacaactgtcctttcatcttgccaatacacagtttatctttgaccctggagtactcactggaattctgggcaaagggcacctactcagaaataatctatccaagaccccaggagctacatcatgagccagagatcaaacgccttttatgttccttttggtccaagatgaagactgtggacctattatattttaatacacaaataaagaatccatcaggggaatctgctgcctcagcaaacactttcatccaaaagaacaaattatttgtgatattagatccagtcagtgtctctatccagtatcagagagatggaaagatcggacggtaccgttctgagggcaaatgcatgagttattggtttgacttgccttttataagcaaaaaaaagcattggagtgctgcagtgttcatcttcatccttgactccaagataatgtgtgctcctatgggatttatgctataagaatctttccacaccttcctcacactttctccttcggccaagagcttctttgactttaggccagagacttacatgagggctaaagctataacacccacagttcctccaggcctctactctgaataatcaacccaaaaacagattaaatgcatgtggctggtgtgtgtttagcttgttggtttggttagtggtttgtggttttgtgtttgtttgtttgtttgtttttcagtaaatgtaagaagaaactgggacatctggaaaaagtcattgtggcacattgtgatggccaccaaatgaagatctagctggcttgagagaatcttctgctttacaacacctttgcctttgttttgtgtcatcatcttcctggtcaggattgattacagaatattaatagcctgaccattcaaagctttcctgggtttatagttgtgggaagagcaaaaattcagtattcttgaggaaaaaacactattaagtgtgatgctcaaatggaagctgctctgtaatgacagagaatgatggaggaacacaacaaagaagagatggcagatgaacaggaatcctagagagacacctgtcctggggcttagatatccccttgccttctggggagattcaacttccaaatcttctacaaggtacatgaaacatatattctaaaagtcttcattttatattaagctcaagaaagctagggtgctataagcagagcttaacagaccattctgattgaagtgtagaagactagacaaaaacagacaatagagttctaagacatgaggttacagacaagagcaagggctcatttaggaactaacctaatggctatttgggttacattctgtcaaagaatctagctatggtctgtttcctcaaactttaggttaaaagataaggggctaatttatttgttgaagaaaatttcacaatggcatatcgtttagactgtagtgtggttatctctatgttcttttaaacagatttataatgaaaatccagagccaagagcagagcatgtgcagtttggtgcaggaaggatcataaatgtatttaaagttgtggacaaagcactgtgtgtagataacataactgtagttatttaaaagcttagggctatttaaaaaaaaagacatacacttgtacaggacaatagaaaagtaccttgactacaagaccccaaccctggaagtttccaaggtataaaaatgcaaactcatttgaaaatttcagtgcctgaaagaagagagccttcagagcatcctgctccaatagggcaacttagggaagtattttccctgattaatctgcacaggcattcaaagaatgctacagtgctggcccaagaatgcccagctgcatctcaaggcagcaatagaactgtgcatcatctgcatggtttgagttttgcaggaatgtaagatgcaagagtggtggagtgatagaggcttataacaaggttccagaaaaacactgatgaggtggaccaatgtgcgacagggctgaaaccacatatactgtaaatgatggagccataaagccagagctacccaaaagtgtcagagttcacatcacaccaccacttgccctgaatgctgctttgaggcttttgtgtggctttagtctcctttataaatggaaatgcttattcattaagtactgttgaatattggaagggagcaactttcttttttacaggggctcaacagctaagggttttccttcagtatcagcaaaggcttcaattcctgaatggtgttggtacaactaagactgtagagactcttgaagttggaataaaggcattttgcattctgagctggcatgagcctatggaagacaggagttgaatgttatggtttgattctaaaatgccccccataatctcatgtgtttggacacctgatcttgaactggtggcacttctttcagaggctttggaaacattaggatacacccagaaagaggaactagatcactaagggcaaaccctcattatccctggctgtttcctgtcgtgttgtcactttcttagtgacacggtgtaagaagccactgctatgctctcccacctctactgagtcacttacaccattatacctttcccaccataatcaactgaaatcccctcaaagcatgagccaaaataaatctttattaccttacgttgcatcaaccatatattttgtcctattgataaaaacagaataactgttacagacaatatggaatttttaattattttacctttatgactaatgctatccattacttcactatcctttgtcttttatagccaaatttattttcattgtttctaaaatcataaaaagtaaagaactggtaatagtagagatgggatttggtattaagcttatgatatatactgagaaacagtttcactaagcattagacctattacattgactgacattagccaatggtactacctgtttaccaaatattgactatctcctccttcccctttcccacatcctttggatgcttagcttcccaccacctgcctcccaccaggagtatggacttgaccatgatttgctttagacaacaacatgaaaatgctcctaatgtctttaagcagaacttgagtcatttggtcttgggttttacctctatctctgctgttaataagtttggtgaccttgacagtaccatttgaatcacaagacacatgcaagatccttctggttctgctactgcttgagtgtatgcactatgcatatgacattatagaagagaatgtcacatgggatgcactgagtaccacaacatgaagattagccttgacccagtgcacagtgtgacacaggaacacattgggctattgctgagacatcttatctactgaattcttttagaagccaatttttcttccctatgtatagcaagcatacttgttgaacttcaaaactgaggcaaccctttcctcagcccagaggaaaagccaaggccagtcctagaatggctcccctttcctcctcttggcaccatctcttcctctgaagagatcagcctccttcctttgcctataggatcggacagtttctcctgtaatatttggggaaaaaaaactgatcctggatgagcttcaaggctttgattcctttaacgtgttaacatactccttttgtttcttggacatagtggctgctctgttcttccttcttatctttacagttttgtattaagcatagtagcaaactgctcctggatcagtcatgagatccatcctgaacatctaagaaataagaaaggggaagatacagggatcagaggaacacaaatgagtgaatgcctgagtgaatatgtatttttgacatgagtatggtcatgccaaggccttggaaccatgggaaattgcacaggacatgaagtggggagtcctgctgaagcacagatccccactctgcacaggacatgaagtgggagccccactgagacagaccctttgctacacagaggcaaaagggaagcaacaagatcccaagaaaagactcaaccttgaccacagacagggtccctataaacgctcctcatggcttaaggcagcttcagttgccttcattctcaaactccccacagaagaaaagccaccatctggtctataaagcttcctgatattgtcttccatttgagagtccaggttattagtggcagtaaagttaaagcagcaagcccatcttctaaacatagatgagacacttacactttccccagatcaatgctaccacacaatgaagacagttcagataactttgtgttccatggtagataaaacagagttcttgccaggaaagagggaaaagacttacaataagctgagaggaaagccccttagtattatagccttgggagcatggatatttcttgacattgtcaaattacctgtgaactcttgatggaatgttggctcaaaggtgtgtggcattaaactttgcactttcccttaactgtctataaacagaggcttgtagtcaatgacaggtaagatctttttgcctccagcccacctaaggcagagtactcatgatggaatgttccaatgatgggtaagtctaaaaagccaaaaaagacaacctaagatagacacggtcgtctgccctatggcaaaagcatgagcattaattaattaaatttagaagggggaattgccagggcccatagaaatagctctgcttcatcttgacttaaggtcagagagtttttgtctgcccttgctcttccaaggtaaaacaacagcatgcctggccctagatgtgaatgaaacaggataattggcataggatgtggtcactgaatgtcctgcctgaataatagaatacttaactcaggagatagttacttgatgtttggggtattgagaaggtaattatgctttcttgttctttgtatcttggtaaagaagtcttctgccttctcctcctcttttttggggtttttgttgttgttgttgttgtattgttgttttcttttccctccattttttatttgaattagaaacaagattgttttacatgtcaatcccaattccctctccctcccctcctcctctgccccccccaactaaaaccctacccatcccataccctttctgctccccagggtgggtgaggccttccatagggggtcttcagagtctgtcatatcctttgggatagggccttgtcccaaccctgtgtgtctaggctcagggagtatccctctatgtgaaatgggctcccaaagtccatttctatgctagggataagtactgatctactacaaggggccccatagatttccaaggtctcctcactgatacccacattcatggggtctagatcagttccatgctggtttcccagctatcagtccggggagcaagagctctcccttgttcgggtcagctgtttctgtgggtttcaccagcctggtctggaccccattgctcatcactcctctgaaactggattctagttcatttcagtgtttagctgttggtatctgcttctacttccaccagttgctggatgaaggctataggatggcatataagtcagtcatcaatctcattatcaggggaggacatttaaggtagcctctcctctgttgcttagattgttagttggtgtcatctttgtagatctccagacatttccctagtgcctgatttctctgtaaacctataatgtcttcctctattatggtgtctcttatcttgctctcctctattctttccccaattcaacctccctgctccctcgtgtcctcctcaccccttctcttcttcccttctcattctcctagctccttctcccctcccctcatgctcccaatttgctcaggagatcttgtccttttcctcttctctggggaacatgtatgtctctcttagtctcctccttgtttcctagcttctctggcggtatggattgtagactggtaatcctttgttctatgtctaaaatccatatatgggtgagtacatgccatgtttgtctttttgtgactgggttacctcgctcaaaatggtttcttctagttccatccattttcctgcaaatttcaagattccattgtttttttcccccactgagtagtactccattgtgtaaatgtgccacattttctctatccattcttcagttgaggggcatctaggttgcttccaggttctggctattacaaataatgctgcaatgaacatcgttgaacagatgtccttgaatgaatgtgcttcctttgggtatacacctaaggcttctcctcctcttttgatgggagtataaaaagactgtgcacaacaaacatgggcagttcactggatgccctcctgactctgtctcttgtctattccttccctcaatccacactccccctctcaggtatgaacacaggctatgacagatggcatccaatgtgggcaccatttgtagtatcccacatctgggagaccataacaacagcatcccgcctggcttatttgtctggtccatatttgcagagaagtgtgtggattaagaaatggcaggcagaaaaaatttaagattctaaaaaggacagagacacacaatagttcttatatgttcctagcctatcctgtatcaggggagaaatgcaagggtttagtttctatagacacagttcagagtatatgaaggaacactctgtcctaaatatagtacgtagtctttagtcagctgtaagagtcacctttaaaaacacaatttgaagcctggcagcagtggtgcatgcttttcataccagtgcttgggaggcaggggcaggtggatcggagtttgaggtcagcctgatctacagagacagttccagaacagtcatggctacacagagaaaccctgtctcaaaaaaaaataaataaataatttaaaatctagaaaaggtccatgtatttgttgcaaagcattccttcctacatgtaatgtattttataataagcatatttataataatatttaaattttacatgacatgagcaatagacctgtggtaacagtgattttcccccaatgcttatttcttaaaacccactcacttctccttatgggtggtaaaattattcacagtaagtgagaaggaaatagttggagggaagagcatggatcaggtacttaaaaagagtctctgtgtaggaagtcagcacaaaaggacagcaggaatgaactgaacccatcagatctcactcttagatttgaatgaaggattacagacagcatcagaggacagtcagatgtagaaacatcagtcaaaggagacacacagagaaaatagtgaaacttcaagggcaagaaggatgcagaggaagctgtggggaccacaagaaaagcagatacaggcaatcagatctccttattattcaagctgcttgtaaccaggacctatggcagtggctcattgtgataaatagttacttatctcctgcaaagcagggatgcggaatgaggagcccaatccagagccaatttttcagatcctcaaatcacacaggcattcgccatccttttgttttcccattccagtctttgtttttttttttttttaaccacacctgccaaccttctggtcagaaggtgctggcagaggtccaaattccataaagaaacaggtagaaaagaaaaactcaaaaggtgttccccttttagagagagattcccatctgtaactggccacctgcacctcagtggccacaccttcatgcaaatgctaacctagtcctaggaagtacctgagcacatggccagtctaaaagctctgttcccaacagtcaggagaacagacttgaagaggcaacaagcagtttctggtaccctccctagggtaagcattcagcagctaagggagtgtggtaaggaagcagaggagcctgccctgtattgagtcatctttccatatccaggcagagccctgtacctgggagaactgttgagtgctgagatctcacagtccctattctaggctccttcaaataaggtttgtttgttgtttgttttttaaatgacttggaattaacttttgacttgtttctacttaaaagaaacaaaaccagccaggcatggtgtcacgtcttttatcccagcactcaggaggcagaggcaagcagatctctgtgagatctctctgccagcctgatctacagagtgagttccaggacagccagggctgctaatagagaaacagtgtcatgaaaaataaataataatttttttaaaaaaacttttaaaaaaatcacacattaacccaattttgagcatatatatctgatatataaaatgatcttgctaaatattcatggaactgggggtggcgctcaaaaaaaatggctcagcagttaggaccactggctgctcttcaagagaaccagggaggggttggattctcagtactcccatggtggttaacagccatctattatgtcagttccaggggatcagatgccctcttctggcctctttgggaactgtacacacaagatacactggcatccgcgtagtcaaaacacacatgcacataaaataagaaaatatttttcaaatacatttgttgaaccaaactgaattttaggggcaatcacacagctctattgcccatccacagttgtcccatgcctaccttgagccttccaccccttagccctgaccactgtgctgaaggcttggagctattttcccctagggttttacaaatatctcattcaaaactataataagcaacaagcttttaatgctttctggtgtgtaaactgccctaggtctcccatggctttagtatgggggttaaaagtatcactgtggactgggagatggctctatgggtaaaagcagagagaggagaaagcttgaggaccagtagtctggacctcacacaacaaaagctcttgtctcaaatacagtgggaagataagactgactgacacctgaacacaccctaggttgtcctctgtaccctttgaactacacacacacacacacacacacacacacacacacacacacacacacactatggtattcacctcacacataaacatgtatacacacacacacatactttaaaaaatcgtttgtcttctattggtttgatagtcatagtcgccatccttgaataccacagcaaactagggaagctgaagcaagacccactgcttctctctatgaaactcctgcatccacaggtcttatttttaaagccctgaccataacaaaatgtgcagagaaaagtgaaagaaaactgaatcaggtccaaatactccaagcctgaagtaacgtgaatcatctcggactgtttacaagtagaatgtagagggaaatggttgcctgtgtttatagaatatttggaaaggaaagtgatcaatatgatatgctaaacttcatgaccacacatttttgaggattggagtgcacatgtgtacatgcaagtcagaggaaactgctcatgagccatccacctgtttttgtgagcctggatctctccctgggacctgaaacttaccaattaggctaggctggctggccagtgagctccagggatctgctcatgttcatctgcccagaactgggattagaagcaccagctacacaacacttgacttttggaatgggtactggagatccaactggggtcctcatgcctggatggcaagtcctttctcaatgaggcaatctcaccaggtcccagatggtacattttgaaaagccaaatcttaactgctgattcctctcataactcgacattgcccagcttatcagaggtgcttgataaatattcatggagctaaaagacagcagtgtgtcaaatatgaagaattggatttacagatttgactaaactgaaaataaaaccaaagcttaactttactatacttgaatagagtcagattttaccctcagggaagttcattcaatctacattgatttaagccatagaaaatctgatattttaatcaaaattgattaaattggctaaactaagaaccattttcagaattcagtgtttatcatcatattaaaaattatttaacgtcatcaatcctaagaattcatagataattttattcaaaggcagaccaatgaaatcatatactttccatactattaaccccaaaaatatcacaatagaaaaaatcatcaaatgtaaggcatttgtccatctagatactccggggagttattattcagttacacttgtatgcagcagaggtgcaatgttcttattcacagtaatgtatgatttccaatcttacatgggtggtttctttatggcctcttctaaatcataagaataaatattatgataaaagcacttagccaagtggtggtggtgcacacctttaatcttagcattcgagaggcagaggcaggcggatctttatgatctacaccctggtctacagagtgagttccatgacagccaaggctacacagaaaaaaaaaaaaaaaacctgtctcaaaaaaaagcacctaaaactatttcagcaaatttctaatatctaatttaatattattagccataaatttgtatacacagtacatttgcactttcagtttttcatttactacacactctttaattctctacccccagtagcaacctggccagtttctatttgtatatatttggtatacttttagattccacatatatgtaagatctatattggagtataatgttaatttgcttgattatatataagtatttcaaagcattgtgtcttatctcaaatatatatggagagagtgtgtgctctgtttaaagacttagaaacatttttattatgccaaaatatttataaagattgctaatattagccaggcattggtggttcacgcctttaatctcagcatttgggaggcagaggcaggcagatctctgtgacttcgaagccagcctggtctacagagcgagttctaggacaggctccaaagcaatacagagaaaccctgtgtcaaaaaataaaaataaaaaaaagaaaaagaaaaaaaaagtattgctaatctttcatctaatccttctcacaaaaggtgtcataatatcatgaattgccagaattggagataattcttattatcttatttcttgtgttagaaaaatgtgttactctgtagcacaggctggcctaaaattcatggcaatccccctgcctgagcctccccagagtggtagcttgaaccatcatctctggcttcagctaacacttctccatgctgtttatgtgtcaaggtgtgcagtaggatgtggactggagcagcttctgcttgacagtgcagtctaatgcatagtgcaggggtctcctccttgctcctcatgaagacctccagatacactttcctgtccagacaagtcaaacccaaagatggtcatcctatcctgtgcctctttgatccctccatgtcctcttcttagccagtctagtttcttgtagagactccaaggaaacttgactccacctctcaagaggacaacatttcctctacatgaaataaacttaagatatctctgcttggggccacatctgcaacatcctgaacttcatgattagacaaaatctggaagtcctttcaccaccctcattgccaaacccatcaatcactacatttagcgtgcaatgctcaaagcttgtcacacacttccatatctgatctgatgcaagaaaggggttgtagctagcatttcctttgatctggatgttctaaatggaatccaagttttgcattagcaattgcttccacttttgactcatgcttgttcccttttgagctttggagtcccctatgactctgagatcagtttcacgttaaactaacaagaagttaactctctttcaacagattgcttcataattaggtgaaagttgtttttaatatctgacataagatttgccctttgagcaggcgtagtgatgtacacctttaaccccagcacttggaaagcagaggcaggtggctctctcctgagtttgaggccagccttacaggcttatagagtgagaccctatctaaaaaaaaaagaaagaaagaaagaaaaagaaaaaagagaagaaaagaaaaaggcttgcctttgatgaagaaatttaggatagtccaaccaaccgactattgcaggcacccctcccaataatactatctacaggtttgataagcagtgttttatcccttctgccaactagaatatgggtgaagacaacaggatccaggagccaggaaacaaatgagcttccacaaaattgacatattgctcaatgtttttaagctagttattcaaacagctacaaacctctatgacttcattgttactgtcttattttagggttgctattgctatgaagatacaccatgaccatagcaacttataaaggaaggcatttaattgaggcagtggcttacagtttcagaggtttagttcatttatcatcatggtggaacatggtggcatgcatacagatatgatgctggagaaagagctatatctttgatcttgatcccacaggcaacagaaagtgaactaaggcactggctgtggcttgagcatatatgagatctcaaaacccacccccacagtggaacactttctccaacaaggccatacctactccaacaaagccacacctcatagtagtaccactccctatgagcctatgggggccagttacattcaaaccagttaccaattctgaaacccttcaccctgaaagcctgcctatgtgccttgctagactgggatatagtttgcctacactaccctcttggtacttccggaatagctgtatcaaagggtgaatgcattagtttggcttcacagctccacaaaatctcaggtaccttcttatgataatatcctgtgtaaacaatttgatgatgactgagaggggcagatgactgctggtgctactcaattacatcaatcagtgacacagggttgcaagatacctcagtgcttcccagcatgttgtcttaaatatgctagttccaactaggacatagatgacatcacctctcccattttctttgtcactctgaaaataataatatccataatcattaatgcacctagtaaatctgaagtgcccctttccccttgcttctttgatcacagacatgaaatgtaaatgcatagggtctttggttcgacctccattcaaaacaaagaaaatgacaagtgcatacatgttatgtcagtggtttaaaggcgaaaactcaccagactgatgagtgttgggtaggtaaagggtttggaacttcttcctatccctctccttcctattaagaaccaacctgcacgcagaggccacaggctctcaatcactgcttatatgccagacaggtgtggcaggccaggtgtttctaggtagggggtctgtatcactgaacaggttagcattgagaaatctccatcctgctaggtgtaagttctattctccaaggtaacagtaatcatggataaagtaggtaaggatattctcatctccaaatgccaggccccttgtcttgtatcttgactggtggtgggcatgccttccacctccggcctaaaaccaggggctcatttttagcctcatcaaatatcataaataacatgcttagttcccccactaagcatgtctattaaaggattcttgtggccagcaaaaaaaaaaaaaaaaatgtacctttccatcatattcattatccagagataataagtgcaaatatgctttctaaattagaaggctctaaatgcatgtacttattattattgcacatttaccaatacatcttgccaacccatttccaggtgtctctgtctagcatgttctacatgtatttaaaccaaacaagtttgaagccaaaataaggaagcaggtgaaacatgataaaagcttaatataatcattaaaataaatataagtgggcaccaccagcccaagtttatataatgccaagtccagtcatttcaggaactattagctccatgaactgggccccagttgtggaaattagctgcagcagtagacctagaatagaaataaagaagttgatccaaaattcatgaaatctggtgggctgtaataattcttgtctcaattgaaaacacagccttgacattaaatgatgtctttattattcagctgggaattgtggattcttatttcttcatcttgaccttcagccatttcttttccctttagcacctcagagactctgcttaaggaattgtggaacatttcttaatacaagttgcagcctttcctttcacaattggaattcagcttttaagttcaagtgactgataacacactcagactcacactgaaaagtatgtaacagatatcagtgcctccatgggtgacaacagtgttgagaggaaaccctgcacaacttgagtgaggtactgtgtaggaggaaatgtctacctgagaaaattcggttcccaaaggcaggaagagggtaaatagattggtggggcctgagtgaagagaggggggatgtctacacccaaaaaaatggcaaggagcatttcaaagagatgttcacactgttgtggcttggatatggtctgtgtgcatctgacgaagcatcacgtgccaggaacatggcccccagtgtggtgctgttaagctgctgggaatgtcaagaagcagaaactcttggaactggttggactatcaggggcaccagcctcagaagagattactgcagtttctgtggcttttgcctagatcttaacctagtcaggcaaccaaagagttagtagaaagggaaaattttttatattaatgtatatggaattattcatgataataatattatcattgcattagtatccacaacccacagcacactgcattaaatgtgcattaaagtaatggaaatgtaatcatttgctactgaaagtgtggtctgaagccagtagcatcaacatctgggaacttgttaaaaaaccttaggcccacccagaccagtgggatcagagtctgcattttaccaagggtccagggaatccaattgtccattaaagtttgagaaacactgtcgtcagcttttgagaactgcaaatagagcaaaaactagcacctggtcaattgacatggaaggaaaacaactcatgaaaactgcattattgtattgtgagttaaactgagaaaaggaatgaatgttttattagcccgtaagtcctcaagaaatgaatcaagccaaatctatccattaccttgagcatcgaaagtgatcaaagtgaacccagagttggcttaatgtgtcagaaaaggaggtctttgaagactggaagctttcagggaagcacaatgattttaaaaagccaacagccagccaagaacaaagctctgattacgtggctaatgatagatttggtaggtcgaaattctaagaactcaccatcacagcagaaccagtaaatttgccaagaaaagtactctccctcataaacattcaaggacaataaaattccagtcactcgtattgtgagaaaaaccactagtagccacagccaactggattcatttaatgggattaagatgatctagagacaggacaaagaagatgtcccaatcggttactggatacaaaaggaaaaatattgacaaatgtgagtattgagggtttacctaagatgcctgaagccctgcattccatccccagcactgcataaaaacaggcatgtggcacatgcctgcctgtaatcccagcattcaggagatggaggcaggagaatcaaaagttcaaggtcattctctgctttgcagcctagagagagagtgctgggtcagaaggatgagaataaatccatctttggatgaagaaccccttttcactgagacattttagcacagtttgtttagcatagtttgtttctaatgagtttcctcttgttgattctggtgtggttcagtgttcagttcacatttaaggctttagacaaaaagcaaattgtcagaagaaaaacaagaatgagtgactgcatagataaaccccaggtgactaaaggcagacctctaacacctaacactggggcagacttggctggaaagcaccttttccacttaatgataatcctcaacagctattgaaatctctgcctgctttctgttctgtttcctggcaagcttccatttgctctggcttttgcaagagtaacagtaagtaaatttgactcaacaaaaccaagtattattttacaagtacaaactgaaaatcaacctaggtttgggcttgggtttttgaaactgatgctaattttaagcagcaaccctgagaatccctggagatttgcatgagctaatcagtagcaccagcattttcagtagattttaagtgttttcaagagcaagcaagaaacccgttacactgttgaaacccctgtccctttccacaagccaaaaaatggttttgatatccagacttagcccatggcaacccttttggtgaaacatctgaacactatcttctctagtgaggagactttgataacttagaacttcaaaggttttgttacatttatttatttatttacatgcatgcaacgttcatgtacttgcatgtggcggtcagaggacaactttcagaactggttttctttaccctctaagccatcttattagctctaaaacttgaacttgatttggggtccacaagtgaggtaagggtgctttgttcatttggtgtggctttgggttttttgagacagggtcttgctacatagcccaggacggttttgaacacatcatcctcctaccactatcaatacccaccaacctccaagtgtttggattacatgtgtaacatctgtgtcaggaattccagactggcctcagagctgatacatagccaaggatgatcttgaacttctgatcctcctgtctccacctcccagtgctgggattacaggagcagcctggtctatatagtgcaggggatcagacccagggccttgtgcttgctaaacaggtacacaaatcgtccctgtcccactggtgtccattgaatcgtcacaaacgtcttacactcgtctcatcaaacctctgaagcaacgctgaacattttgttgagcaaaacaagagcgtaagggagaatttacaaatggtgggggaagaaaaaaggctccctgcattctatgataaacatctgcaggcttcagcaagggtcagttgataacatttgaataattaacgtttttcacctcagaagaaaactatgctgaaagcatttgacacaggcacacctgtgagagaggtattaaacaggtagttactggccagctcagagttggcagggcctacatccacatgaccattgtcaccaatctttcaggactagtgaactaactcaagagtcagacaccactgtgagctaaatggactgcacccaatgtggggaactgatctgcgatcaccagaaaagtaaagatatggtgtgttcaaaacaactagaaatgttcaaaggactgtccctttcctagaatggaggcttaaagcttgacatacagagtccttccaacctaaggaagaaacagggccagagcattcacatccatccatctccacacacacgagcaaacaaaatgatcttgttgcacctgatttcccttcaaagtatttcaacttgaaaccacaggaaacgaagtttacatcaatatgcaaaagcccccgctctcgtcccaagctccccttgcctccatcttgaaaagttaaacttagatagatagatagtaattatatacctataacaatatatatttcctccaagaagtaccaagaatgtagtttagaaaaagaagagcattcacccagtatgtgtgaggccctgaatttgactcactacctgcaaattttaaaaaatacaaacaaaagcattagaagcttatagtattctcttatggctcacaaggaccattaagagtgcttgaaagcacatagacttacagaaacatagggaatgcgtttctaagacacaagcttttcaatctagacagagacagctgtttgcttcaacaaatcctgggtcttcagaagatgctgttatttttattgctttttggagtactgtgtaaagcatggaaccttacagtttgcatagtaagcagtttccatctttaaatagactcatgtgataagaaaagatacatgcagaggaaatatataggattgtaggaaccggcatttacattagaaatggattcaaacatcttaactttaaaaacagaaaaggcatctgcaaagagccctctgagactgtaggaaatccagctttccatgtaagcagcctttcactgagagacatgagtgatggcagacgaaggcctcttaagaatagattcaacagaaaatgacagcggctcattcgccgagagttttgttccaacttgtttggttacgaagaggtcttttgcacatctgtctatggtaaatgtgtacttctggctctccttgaccaaacactctctgtgtttctttggggtctcttcaaaggcttctttgacaaatggtgttttcaactcaaggcctgatttgtcattgagcgtctgctggaacactgattggaatggattatgtttaagaggcagagggtgcctggtgttttctttgctgatcttggttaagacatgcccttgagctgccaggcagtccatatcgatgggagagaaattccgcctgggtggggagaaggccgacctctcagggacaacctggtgagcctgaaggtcagttcttgaggttgggacctcaggtagatgaggcagcaccagagagccttccggtttgggtggcatcatgtcgtgttctgcactaaggccatcctgaactcgggttcctttcaagtcccagctggccccaggcttcagggcttgaacagaagtggtagcatttaaaaggtattgctggtagagaagggtgtcagcaatgggaccacatttgggccaaactaaaaatcgtgaggacaggggatattgtctgtaagtcgtggccacactgacgttagaagaaatcagttccatattccctgatcctgaatactgcatggtgagatcaaggcaggttggtaaaaaattacaaaagtccttgcttggcagctcccctgcggtgggactgtaggcacttttgtaggaattgtattcaggtcccggcaccatacggttgggaaggaacaaggcagcagcttgagaagtttccaacatctccctctctttatattctctctccagcataatgttctccagctccttgtcagcaaaggctcttctcttcctcatcctgtcactgacaggtggaggtagaggaagggtccctccaaggtaagtctcagctgttattgggcgatagcctaaaagaagcaagtattgcaaagaaaacagatcaacatcctgacaagagaaatctgaaaatccagaaggcaaaaagtaacatcacaaagcacaggattctcagttacaattccatatcgctgatattttaatatagaaagcaaaagtatagtttttgctttaagacagtttccctttggggtaaggtgcccatacggtagcttctggctgtcattgtttttgttggtatagtgactgagattttaatattcttcccagatccctagacattgagagacaaataaatctgtccaccttattttcatcagtgtttcattgcccgtatcatctttttattcttttttcattattataaaagatatctatacctacagctgatgtcacttttattttctaaagatgtctcattatgtacacagtgttacagctgtagaataatccaaggagaactaggagaaaaagaaaaagaaagttaaagaagattagtaaggagaaaaagtagaaaagacttgaggacacagagaagaatagaaaaactaaagaactgttaactagtccaaacacacagcacctaacaattcagccaggcttccccttgacctcttgaacaaacaaagcaagacaaaacaatgggggctgcagatgaagcatctccagctacagatctcaaccattccccccccaagtgcattcatgttggccaaataccaaaagggctgaacaagatgcagatgaagccatgcacagttcagaaatagagacaaaatcaaaaacaaaagctagtagaacataagtaggatgcttggagtatttatttcaccactcccaaacactcaggcactagcagatttttctgcaggacccagtgtggtgtttgtatttacacagtggcaaatcccattatactccctggcaaataaaataaaaattgaaaactattgtttccatttctagctttgccaaaagtttcaatttatcaatgtggtccctatggttgtaaatgtttacttagctactttgcaactaagttcaaaagtcagacgtgcacagcatagactgagacacaaacgttaaatttgtccaggactagctaaactcagaagcctcagaagaaaaaaaaaaaaaaagaactcaactgcccacttcaaggaaggaaacccttctatttaagctgaactgaaggaggtggcagtgattaaagtaatttcaagttggataaaggcaagggaaatgtaaagacagttaaggaaaatggtgatggacaaatcaccagtcaataaataaacaccatgcctaaagccaaatgctttagaaaagcatcactagtttaagaagaataaatgtgtctctaagatttgtgggaaatgaaggcaaggggagatctagactagcagcagcctccagtttgcttgtgtgattccaatcctttcccatcctacagccttgaccgacaaaaacagtagggagggagtgtgggggagcagcgggcatctagattcccaaggaggaaaacagaacaacgctaaatagtgaaacttgaggccacaggtaggcgactcttggtcacagctgtaatcttgttgcttcgcttactctgcccattaagctccttcaataactaagagagtagggtggagtgagttataattgttttccttcccaaaggtagcttccgggatcacttgacggtgcatttttgtatgtccctcacactgaagcaaatttcacaggcgctgcagcggagcacattaactagtcagaggataatattatcctggtggcaaaaccctctgcgagtatgtggcatgcattttctaaatatgagttcccttccccgaggcaaactttctaatgaagactggctccttcccgggttaatacaaatgtcatgcgtctaaatgataagcatccttcaacacgattttaaaagccaaaggacaacttgacgttattttaccttctaaaatgcttttggccagcaaacttggcgccctgacttgcctctggtacactgctttccgctcgaaattattctgtttcccggaaagccccttcttgtcctgtaaacacaagaaacaaccatgggagtgggggaagggcatccacaaagcctctagagcgctccccaacctaaaacgtatttgttttgccatctcttatgaaaagatattccaaagaaaattaatgggagcgccccttaatctctgctcagccagctagagggtcagtcactcctgctttctccggctatcactctgcaagacatttaaagagacatctagacagaggtgagatccacagacaaggagactttaggaatccagcctggaagaactgtgtttcgggtggggtggttgcctccctaggtcgcatccactaagctgaaggtgcccagaaactgcctctgaggaccaaaaagccaggcggtttctcccctaggtggaatagacatgatggggtgccagagactggggagacttctgtgtttgtcttgtcctctggaggagggcaatacatgaatctcaaagcgacactagcctgaaaactcgccgctaggttgctcccaacccagcgagctgaggagaagcctagcaaggcagagcaggatctaccccaaccaggaaagaggttgaactcagaacctgaagtcccgagcagccatgcgctgaggggctcttactcttactttttgtctcctctggaaaatgggcatcaagttctgcctgagtgtcaaggtgacagcacagtgacagcacctcgtgctgctttattctctgtgggcgttattaacacagtgactggaggcaccgcactctactccctccccgaccacctgcaaaactagccctgaaatagtttaatgacttttccgtggtgtcccaaatgtgcctaattatttccaaggccatcttttgtgttttagtgggagactttcctagcatgctttgcagcgatgcccacagctttccctcctgggcccgcaggccgcccgtgggcagagtatctgctcctctcctgctgttaagggattcccattctggtggggcacgcaccctcgagacgcacccctggcctaagagcacccacctcggtagcctgctgcctccggagcgccacctgggcggccatgacacgctggcgctccaccacgagcaggcagttagcgcattggcagtcccgccagcgacagaagcgcttgtggcccttgagacaggacaccacgccgtggttacggcagcgcgcgcacttgggcgtgcggctcagtttgcgcggctctgagccgccacccgcagtggcaccgcgctcaggagctgcgggcgcggctggcagcgcctgagccgcaggcggtggcctgggtgccagtcctccgggctgctctggccggcccggcacctccggggacgctcccggctcctcgccgtcaccctcgtcctctgcgtcttcatcctcctcgtcttcgtcgtcgtcctcctcgacgtccctatcagccgctgatggacttgctccctgaggcgtggcactcagaggagccccacagccatactcctccagctctaggctctccacatcgatctcccagtctccggctcccgggactgcctgcccttcggtcatggcgctaggctctcctttgccgacactctagggagacagaaaggaccaaagacccgcccatcgtaatcagggaccctctcttgagccttggcccagaacttcttcaaggccagaagttacccagtttccttctggtccctacaatacaggccacatggacccagagactcacacacaactcaaggcaggttttaatttactaattccgagtggcctgtgcacctgacctttaaccgcagccctgtctggcctttccagacaagtcacccactgaccttacacactcgcccgtttaagccacttgtcaagctcttccatagccggctagcacggccataatgcgtataaaactgttgatggaacaattatctttcctttgattacaaggaaccttgaaatcacatttcccaaatgtccctcattgacctgcgccaccacaaggaccctggagaggtctttgcatcactcctcttcctctaaaccaatgctgtgttattactagagggtccccccaacacacacacacacacacacacacacacacacacacacacacacacacacacacacacagcgagtgggggacacacacaggccataaagctgcagaagctgatctggcatcagcagtgtttggccgcacggggttgatggaacttgattttcatctttaaggcaagacaaccagaaacagaaagaatcagtaatgatgattcatgctccccatgccctccctgactccggaccggcgacatcacaacactcaccaagactcagaggcccaggctagcaacccagttaaaagatatccagctttaggatttttctctctggagctgtaagcagcaggagcaaactgagaaaaggagtctggcagcaggaggtcggagcccactggatggtggggagggacagaggcaggaggtgagtcaagtcctcagcaacctcaccccgcacatcccaaattctgtaaagttctgttcggacttctgcagtctggatcgcttcacttcgcttttcacttctggttcaaactgggcaggaaaggtggggctccgacccaggactccgccgccgcaggcgcactcagctagctttctgcgcagcagagtcactcaccgcagtcccgggcctccgcgtcccttcctagtattatccacccacccacccccacccccgagctccgcgtcctctgattggtcggttgtcaggcgctgtgcacgccgattgggcaaagcactcagcctgagcgccctcctcctctgcacagaggacgcttccctcccagcgctgctgcgccggagtccacccgccagccttcgctgcagccgggtccttgattctgcagctgaacctgaaagtgtgagcagcgatctcggcggagaagtcgccgttgatctcgcggactagggaacaagctgattctcactcttacgcatcgtgttgttctcgagaaggtaactcagaagtagagatcagaaaagttagcgttgatttctaccgatattcttcatcagctctggtattaaaccatcgacccgcagctaggctgtgaaaagaggccactctaaaagggcgcacaggcatcttgctccccacatgaacaagtccatgctcatgctgcaggacagcggctagctgtcttgcaaatacctgtttttgtggataactctgaagtgcaaaacagttctttactgtcacagagctgcgcaggtgaacacttcaactacgggtcacttacattttcctgctgtcagtgggtagcacagttcatgtcgaagaaaatggaaataatccacgtcattagaaattttagattcaaaaattgttaatctaagcatgtgtttatacaaagcaatttaaaaactgctttttagcgtgcatgaataatcgttttataaagaaaatggactttcttctctctctctcaaaacacccttcacagaaatgtttgaaacaaagttaaatttcccacgaatcgcaaggaagtcccttaagttgcgttctatatatcttaagctaaatgtaaaaccccacggacgcttttgtagtctcacctttaaatccagccttctgcaggaggaagggcttaaaagaaaaaaggggcaaaaaaaaaggaaaaatacttgcttgtcgttctcctgcactcgaggcagaccactgatgggtatttgttgaagggagacaatttcagaactgatttcagctttcctctaatccgaacctgtcagaaagttcagagtcattcaagcttgccagcccgaagtggaaacaaagactagccgcctgatggaaatacaggtattttcaagccattgatgaggctgaattcctcctaggacaggcactggggccacattttattatcattattattattattattattattattattattattattattattatttttgcctttccttcccagagccaaggcaatgtcctgctaaatacatggacatggccttctgtatgttccctagatttttcaatgtctctgggggtcttcaggggcgacttgtaagtcgcaaggctgccttggacaatttcactaggcacacaggaaccaactcttggtgcctctccttagcaccttcgtgtaacaccgatgagtttcgtcgtttgtgctgtttcttatctaaccaaagcctttctttttttcacctgggtgggggcttttgagttcttgactacaggagaaacatgttttttaagctccattttctcagaagatgaaagaaaacatgaagccctgagagacccattgtcctccgggaaagccggggactgggtcaagaaccttggacctggatagcctctgtcaccgaaagagtcctaggctctcagcagcaaatgctggcagagggtttgccacggtttcttgactgttgttgttgttgttgttgttgttgttgttgttgttgttgctttgtttttgttgttgtggctcctctgtaagccttctgattttagtgcttggagttaggagtagctcctccatgagagaattaggcactggtcttttgttggttgttttggttttgtcaaataatgctgagttttcttcagcacagccacacagccacacagccacacacagccacacacacacacacacacacacacacacacacacacaggatgcatttctactttcaaaaaacaccgtgtttctgggcatctgccctcgatggaaaccactactctgccagatcatgtagaaaacaggtttggttcttatttattgcttgtatagcccctaagagtaaagaagatagaataattagctcttcaccagtaattttaaatattgagaacatttaaatattgagaacatttaaatattgagaaaataggtttgcttactactaggcggcagaggggggagccaggagagaacagggagagggtgcgggtagctaactgcttcctaaactgaaagtaaacaggctaagagagctcagcagtcctcggactagcttaaactttaaacagcacttgagaaagagacaaacagtatttgtgtacatgaaccagtcagatgaggccaaaactgggaaaggggacttgggaatagggggccctaaggcaggggagccaaccaagaggaccagcccttgggaatgttctagagcaaagaccagactccctgttgtgagcttgctgagccagaccagggaagggatgctgaagagcttaatggctcagctggacccctaggttacaggtatggatacttctccagtaccccatggacagggaaatcactggacaataagattcaagctgtctgccgatacccccaacacacattgttccccttttccctgtgtgccttccccctgataccactgtctgtgcactttgtgacatgcagctgcaatcaagatcctctggtcttgaagtcctccatggaaccactgatggggatttctccaagggcaaacttcaggaagtccaagacactcccatactaaaagtgaaattgtgtgcacttcttctggaagtaaatggctatgccttttattgggctgccaaagggtgccgcagctacacaaattgttcagtaaactaaatattcagaagacaggggtgagggagcctgggctccagttggttcttccacacactagtgaccttggtcaatcatttttctgcatcttttacagtgtcctttccggacctggcttctgaaaacttcaactaacaaaaatagaatgatggatgtgggaactccgaacagaactccttctcctcccaaggaacagcacttgcatccagcctgagtctggcttctcttcgccctgtttaaagggacttccttgactcaggacttgttaggtgaggaaacaagtccctaagaagggcttgtaaaccgacaccaagtcacaaagcactgttccttccagtgctttttgagctgccacggtgctctgttgtgagctgtggagtggtctccttccactgctgacccatgtgagtggagtgtgtcctcgctccctttaaccacacacacaccactcttcctaccccagcacaatttgagcctagcagctgagacaccttcagaaagtcaaaagtgaaacaggattgaatgaaaggaggtggggagtctttccttggtaagagtggcctggtgctttctccaaacacctgtccaaacacaaataaataatccctagaatggcccctgggccaggcagctcagctacccctgtctttaccacctaaggccagtcagcatctccacactggccctgagaggcctccacttgctcaaggggactctatggtaaccaaacctaaagactcaaagtggacctaggggaccactaccaccaccagcagcagcagcagcagcagcaaaagtttaaactgcccagtttaaaaaaaaaaaatctgtgttgtgattgactgttgggcacttctgagcatcttggtataagggctttgctgtggctaactggctctggtttctttagagatgacctcaaacctgtggatagcaacagtgtcatacatacagtttgacaactttaactggctatggacacggtgaaataaataatcccagatgggaccacagagatatgatttcccaatttacttttcgaaatcagatatacaacctgtcacagtcagtggggtgaaggtgagcaaggagagcttttaggagatagctgttctctaccatgccggttagcaggccccctttccctgatgtgacaccctcagaagcaaaggacaagaagatccttcttgttccttctgtgggaagcctggtgttaggagacattgaaaacagaaaaggaaaaggaaaaaaaaaaaagctttctccctgctctgcatttaagggaaattgaaactcaaaggaaatcatcaagaacttgctggggtgtgggggacaggatgcacaacaatatagagtctatgcagaactaacgaggccttggctagttctggaccagtccaatgcctttctatgttttgtaaaacatgccctttgaggtaggatacagaatcccattcacaaacagtgaagcaaacttgcaggcatatctgccaccctgcgggccccaaccctagccagcctctaagacaggacaatatgggaggaggggctgggctcaattcatttgggggccctatagcagtcaggcaaggagaaaactacagtcctcttgtcctctcaatatctatgccaaatattccccaggaagcattgggacccagattctacccagtggtggtggccctgttatagaaggcagtcaggagattgaatgtccaagtgcccccttgtacccatcccatggggagggaggatgttcaggatcgagtagaacacagcccttgcccctgggaactttccacccccatgcctgtgttagatagagtgtgactgttcaagtgttagacattgctgatacttacacctcatggcactctccatgtttccccaacactctaaccagcaaggtagaagggaggcctgggagcagagtgttggtcctgcaggagctacagggagaatgaaatgtctcccttgtttatgaaccactaccctgtccctgcaggtcctttagtgtagaaagaatcagattgaatggtttctagtttctaccaaacatgaaaaatggtatggaaattgaacagtgatggcctgctagctcaggttaacaagaggggggtggggtgtagacctgttggttacattctcagggttttttgattgcacagggtcagtagcagaacccctgaaaaccaaatctatccactagggaaagggtgaccccagtctcacaaagaactcattccctggagtttagcctggattcattccagtggccaaaagaggccacacaagtcacaacctgcctgtgaccctgtggcttctagactaggtctgtcctggctgaattttaaacaaaaagccagcaggccaattgttcagacctggttagccctttcttaagtttactctggggttcgggtttgtgttctaacgaaaatcaaaatgttttccttactgtagatccaggaaggctctctgaaaggtgtactcagctgagcgggaaggctccctccttggggctcaactcctccagcctgggagaggactagcccaaagccgacaagaagggggtggggctgaagacagtgtgagggaaagggaatggaagtctccttggctgtgtatctaggtaacaagtgactgtctaggacctcagagtgactgaagtgtgatcctgtgtctccaatcaaaatggcaaaaacacaggccctaaaaggggacacaacttgcctaaaaggggttctttctatctatatagtaaatgataaaggggagctaaaagaaagggagagagaaggacaggggaggaaggaagagaaatggtgagaagaggtgcgattggaaactagctctctatggatccagttctattcagtcaactaaagcagccctgaccttgggccattttttttcgccattactcttgaggcttctatgtaatgaaggaattgaaacggacctagatcatcgctgaagacttttcctgaattcagaatacatctgggtggggtgaaaggaggaggaggagggggaaggggaggaagtgggggggaaagaggaggaggaggaggagaaggaggaggaggggagaggaggaaaagaagaagaagaagaagaagaagaagaagaagaagaagaagaagaagaagaagaagaagaagaagaagaagaagaagaagaagaagaagaagaagagacttgcatgagtggtccctcctgcaagattgtagggaatcgagacggggaaagagggacccacgccagctggagtgcgcctttatggcaaggcgctacataaactttaagagccgaggaaatcttctctttgaaagaacgagctgactgccagagcgtaggagggctttccacgggaggtgagcccttgggaagggccgagctaggagatgtcacttgcttcacgctgatttaacgtggggtggggagcgcaggtgcaggaaactccagccccttctcctgtccacctagagcccctgagccctccacccctgccctttctttcatagaaaatttattgacggggtgaaagccggctaacaaaaacgcagcctcatgggctccacaagaatgctttgatcccccttcagtgtttagcagtcccccaaactcctgagatccctgaggaccaatggctcagaggtccagcttccataaaaccaatgcttgctcgccgcacaaggagaccgcgtgggggcgctgtgaacggccaccctctcagggtccagagcctgggagacacacatggccactgaattacatcctctctccctccctctagctttgccaagcaagcctggagggtggctggctctccctgaaggaactgtcataatgctgactgtcggcttccttaagcatcctgattacttcttctagcggtcttgtctcctctgcttgcaagaacctggaggatcacttcactcactgacccttaaggtggaaggagtcataatcgttgtggacccacattttgtcagattcagagtctgacccctgcaacagacagccggtttcagaaggctatcctgcttggagcaccatgggaaaggaaacaaaacaggatctcaatctgaggccatccctccgcagcacgcttctcagcaggagttagcagctgtggcgaccctggacgcctaaggtgaactctgttccagctgcttctgcataaagctccccattggccttccaccggaagctaactcgatatccctgagcacacattacagaactgcctccatcccacccccacggcacccaccactcctgcttctgctttgtaaatcctgcaaaaatgatttgagaaaccgaggacctttgggtggaaaacgggttttcagaatgaaggttcaagtttgatggtaggaaatgtacccaaaactatttcaccaaagaacgggtcataacgagctgtgtagaccagtcagggttctgaaagcccccgatactacaaatcatttctgaggaccctgagaaattttgcacaattcattctctgtgcctctgtttcctcatttatagaagccaggctcttgacaacatcaagtttataatggcaaaaacaaaataattgaaactcaaaaggtattgtgaatataaggtgtccaggtctcccttgtctatttttcttttcttttcttttcttttctttttttttatttgagtcaggagcatcacatcctaagtaacaagtacataaggtcaaagatggcagtctccgaagagccaccgatggagttacaggtcctgttttgttaatatgcaagcgacccttgtctttcaaagggagccaccgccatcccatgccttctcaatcaaacaaacatgcagagacttacttttctttggccaacatggggccagtctttcaagtgtttagaggaattgcttgtccctgcaaagcaagaaagacacgccctcctggctttgaagagcaggtgagttgcagcaaggggacatctcagaactcaaaatttcccttcctgagaaactgttactgaggcagaaagggacagtcaggcttccattcctataacttactttccaactgcaatcatcagctgggctggtttttgtttggttggttgtcattatttgttgttgttttttgttttgtttggggttttttttggtattgggggtttggggggagttgtttgtttgtttggttggttggtttttcaagacagggtttctctgtggctttggaggctgtcctggaactagctctgtagaccagactggtcttgaactcacagagatccgcctgcctctgcctcccgagtgctgggactaacggcgtgcgccaccaccgccaggctctgtttgttgtttttgtttcattctcttacttaaggaaaaatttaacaatacacaaaagtaggtcaaattgcataagatctactaaaataatctaatagaataatacatgtgatgacccacaagaatatatagcatctatgcagacattaggcagaccagccattgccaacagttactgtgcacaagcttgagagatctatgccaatcctgcccattactgagttggtaagatttaattttacccaatgaatggaattttggaggccagggccccggtgcactgtatacttcacaatcatgtgttgaatcatttgaacagaatattcatcaactgagcacccagcttgatgccagaaggatgagggacagagacacaggtggccagtgtgaatagtaggtctacattctagtccagaaacttgattattcaatacttgatctgctaaaatgaacttgggagttgttctctaaaacagtcttgactccctcaaatagtaggatcgctgtactaaaattactatttaacagagggggaaaaaaatctcaggtctagctctaaaactctgaacatgtcggctcctcccaatcagaaactctgtctctgtaagacctcttcaattctgtctcgttcatatcaacaaccttccagggtctctaataaacagcgagttattgggttttgttgctttttttgttctcttaggtttttttttcaagcccagtttgcacaatactcgagtacatctgtccccttaactttcatccacttaagcgttgcagagtcactgaacttggcttatcagttccaaaaagaatcaaatctggcttcagtgtggagtctagcccaatacatgaaagcacagaatcaattctccagttgtggtgttctctgtagtattcccagatgtcttcgcattgtttggcaaatctataatgtaataaatattgatggtcccctcacatgtggtgttaaaatttgctcgtccaaaaacggatcttcttttctgcaatctttttaaaaaaacatatcactaggtttgttgtcttgaaattagtttgtactctggcagctttctttaaatgtcaaccagatgtggagtcccattacagtgttctcctattttacaaaaacaaattttacttgtcccacagattggtagtgttttaaaacagttgttcttcaagagtctcccgtctgttcctgaatagagataaaatattctaaaagtcaatgaacttcctcacataacacatgttttaattctccttctggctacagaatcacgcttcctgccatttcagatgtatttttcaagtaaccactagtgtagaggaagagacggtccatagaagagacctgtcaattacagccttgtcccttgcattcacagtcacacacacacttccattcaaagctcctgtttgtgctcctttccaaaaatattatccttctgggatgaaatttttcacgcataaacacagatcggctgaatgactttttttttccccctaaggtaagtttgagaaaaccaattcttagttatttgagagttaacacacgctgtttttcaaacctagatgtattaatcattaagaacggaaaaggagaattggtgaattgattctgtagtgagcaagactcttgagccttcggaagtcaccgaacacttaataaaagcaaaagtgatttataaatcattttagattatagatcttacagattttattaaatctttaggatgatggatttatttccatttctcagtggagccacaataataataagcatccagtgccacaagaatatgtgcatttgatagtgctggtttaaaaaaaaaaactatgattttgttatcacagctacaagaacattttttgtttgcttttctgctttgaaaatagttcctctattaaaaactaaagacacaggggcataaaagtatctctaatgctatactgcacagaaatatgaaatgagggttctggatcttgggtgatgctgtcagaatctggtgattctgcatgtataagaccctggatataatccccaccctgggggatgacagggtgaagaccccctggaattttcacagaaaattcatatcatgcatatgtgtcgttttctggaattaattcttaaatatggaactttggaacgtctgacaaacatacacaacagtgacatcatctttgcctttgtctgtattttcttgtctttaaaaaaaaatgtgtgtgtggatgttttgcctgcatgtatgtcaatacgccacatacatgcctggtgtctgtggaggccagaagagacaaccagttcccccagaactggagttacagacagttgtaggctgccatgtgggtattgggaactgaacctgagtcctttgcaagagcaacaggtgctcttaaccactgaaccaactctccagtcccttgtctgcatattttaaaaatataaaagcatagagattttattcttaaactccttcataactgatacaaaaaatagaatttaaaatcttttccaaaaatacagttttttgttttgttgttgttgttttgttttgtttgttatttttttagacagtttctctgtgcaactgccctggctgttctggaactcaacctgaaaaccaggctggcctcaaactcacagagaacctcctgtctccgcctcccaagtactgggattaaaggtgtgcaccaccattgcacggcaaaaatatacttttcctgttttgtttcaatgctgattgatgggggaggtcgttctgtgtatgtttatcttattggttgttgaataaagcactgttcggctaatgaagcagcaagttaggtgggactaggggtcaaggaggattctgggaaatgtagtaaagtcttgtgatccaggtaggaagtgacatagtaggcagactcagaatataatcagggacaagcaggaagtcatgttcttcctcctcctctctgtggagccaccatgtgagcctgacaagagaggatgcacactgtcagtgtcttccatcaaataagtctttataaatatatagattatgtgatgtacagagcatagcaaccgcccagggagggcctatgggccataacaaccagttgaccagtcaacacagggcaagtcctccaaccctggaggcacaccaatcctgagcctgtgcatacccctagatactccccttatgctgccctataagatctctatgcagtggcttctcggcatctttcccagccattcaccatggtggatggatgaaaggcctgagctaacatggggttagcttgttaaacaactgcaataaagcctcgtgctgtttgcattaaaaaaatagagagattatggctatgggtaatacttaagacagagctagcaaataagaaatcttagtcattggccagcagcatttgtacctaatattaatctcagtgtgttattttgggcaaccacgtggtgacggggcttgggcatcttggtataaagatttatcattacagttgatggaaaacaccacatgacttggccacatgcatagcccagccattagcctttatttaattgtaagctctctcaaatatataaaactaactacacttaaccttatatgaacagtgagtctctagtatttggtttggggagaaagaagtctctgtagagccatttcatttctatgtcttctgaattgtttataaaattttaaatgaagtaaccaaagttgagcatttttaactatccacttgtggctatttcctaacagaggatggtgagaggacaattcaacatatgagaagttactcaggagcagcaggcaaggacgactccatgtgatgtcattgaccttgtgcttctgtgttattagaattccccctacccttggggactcaccttcctttagaatcttatctaagcaagcaataattaatttcaatccaagtcagccctgctaaggttcagcacagatgtatggaaagtctaagcagctgcttccagtgaaagaaaagctactcatggactccactaccagtcccctgtggctgcaccacaacagccccaccccactttaatgggcaaatatctgtgaaggcacttttcacttgttgtgtcactgccttaatcagattctgactagaaaatgttgagcaaggttcttcctttgtctgtagtgatgtatgattgctttccttccccaaatttcagttgccagtgaaattataagcagaaatttaaaaccatatctgatgatgtttcaagccataaccagatctatataatgtgattgaaaaattatatccatacctctcacataggctgttactacaatacccagaaggctgttgggatgaaaagttaaataactcaaagactacagcagtttgaatgtgatttcgtcccccataggttcatatgttcaaacacttcgtccccagcaggtggcactgttttagaaggctgtgaaatgtttaggagatagtgccttgctggaggaagtgcgtcaccaggagtgggcctagaggtttttttggtttttttttttaagatttatttatttattgtgtatacaacattctgcttccatgtatatctgcacaacagaagagggcaccagatctcataagggatggttgtgagccatgtggttgctgggaattgaactcaggacctctggaagagcagtcagtgctcttaacctctgagccatctctccagcccgggcctggaggttttatagcctaaccccatttcccatctgctccctatttcttgatggcagaatcagtgtgaccagccacctcttgtgtctgtctccatggcttctctgccatcgtgaactatatcccttaaagctgtgagccaaagcaaacccttcccccttgaagtcactactttctggtcaggcatttgattacagaacaagaaaaaaataactaattacagagaatcaaactgttctcctttgaggactcggctttggggactggggagaaggaaggggccatatctccaagcagataggaagaatgattgaagacatgacatcgttgtgccgacccacaaggcctcagaggcaagtcaaataactccattatacttcatcagtggaggactttctaagcaaaacggtttgtggacactgctataagatagctaaaagagtttacaggacagagcctttgtctctctctctgcctatttgaaactaagataggctagtgacttgaacaagctatacttagtgattttagacagtacagtagtttattaagttaatgatttagatgttaatcgattccctagatctgggatgggaattcatttccataggacagtgcttgcctagagtgtgagagtccctgaatttaacacccagtttgggctcattattgggtaaaattgcttgccaccaaactggtgtggaagagaaaaccaactcctataatttgtccaatggtctttacaatcaccctggcacatgtgtgcccacacaatcaatcaataatgtaaagtaaatccctagattaaatctctgcccttctgcaaagttattttaaagtagaggttggtaaaaactttgaagactagctttaatttttctggacttgattccaaatgccaaaaactaaccaaaagaccaaacgttcatgtaaggaaaacaaacaaacaaacaaacaaacaacaacaaaaaaaagataggccaacctaggttccacactctctcactgacttctatgtagtaaagtttactcacaaagtcagtgtcttagttagggcttctattgttatgaagagacaccaagaccacaacaagtcttataaggaaaacattcaattgagggagcttgcttacagtttcagaagttcagtccattatcatcatgatggggagcatggcagcatgcaggcagatgtggtattgtaggagtagctgagagtctgacatcttgcaggcaacaggaagtcaactgagacaatgggtagtatcctgagcataggaaacctcaaagcccatgcccacagtgacacacttcctcaaacaagaccatacccactccaacaaagccacacctcctaataatgccactccctatgagattacggggaccaatgacaaaaataccacagtcagtctctctctcatactgctcagcctccagcaccctcagcctgccctgtctccatagcctgctctattagcagttcttcgcattgtttgttctcccctacaaatcaggtgcatcatccagagttacctctgtgtgaactctaaccctcatacatcactttcccacccccccaaccccgtaccccagtctagggccaccaaccctaactcgatcctgcaaagccatcacaagttcagtttccattttggctattggaacccacccatgctgtacgaagatccctctgcagatctttatggtcacctggcctgtattctcccctgttgtcacaccccacttctccgataatcataatatcctttttaaagattttctcaaatcccactttttacagcaaacctccgtctgcccttcctctgttgacctctggtttatttgaatgtctgtagtaactacaatccacctccatgtatgttcacttatttttgtatgtcttttttatcatcttggtaaagttgcctttccaaatataggatgtaagtttataaggaccaagaatacattgcaaaacccttcctgctcccaggaatacctagaacaataccttgaagacaacaatgtgtcagtggccatctgacgagtaagtaaatgcatcatttaattttgtgagtggtaaatgaagcctttcttattttgacccaacagacactcaaaggagttgatatttaagggggaagaattccaaccagagacaatagcaagtgtaaataccccaagaaagaaagaatgcctggaacgaacagagaaaaggaagtggtaaatgccactgctgggtgtcaggaagggaaacaccatcgtgaaagtccatctgggttacagagggatggtcacacagagcctagaacttacactctgaagaagatggggaacttttgagggatggaacagattggtatgacaagattcaaacagtgcttgttgtcacagcatggactccggtgtctaagatctaaccaggacttaaggcatttagtatcattaaaatattcctctacacataagcattttgctggactagacacatgtgagatgagagacccacttcttgaaacagtacttctgtatgtatgctcctggtatagatcagcactgaaacacacacacacacacacacacacacacacacacacacacacgaggcacaatgacacaatgttctgaagtccaaccttaccattgtgtagatgacccaataggcttgtggaggtggaataagaccctgcccaagtcacacagtggatcaagtggactttgtttcagagcctttgtctccacccaactactgatatacaaaataggcaacatcagtgtgctagcatctccccttagaatgcctactattcccaagcttgacatccattgctgacaagataataacaagcctaatacctacaactctttgacatccagctattgtagtctgttattataggctctctgctcacctttttaatatctgggtggtttgaaagaaaagggcccccaaagggagggacactcttaggaggtgtggcctttttcgagtaggtgtggtcttattggaggaagagtgtcactgtgggagcaggctttgaggtctcttttctcaagcttcaactcagtgtgatagtcattcgacttcctgtggccttctggccaagatgtagcaagcaccgcatcagcctgcacaccaccatgcttcctgtcataatgataatggactaaacttctgaaaatgtaagctgccacttcaattaaatgttctcttagtaagagttgctgtggtcatggtgtctctttacagcaataaaaacactaagacaatatccaaaggggtaaataacacacacacacacacacacacacacacacacacacacacacacacctttctcaacttctagaaattagaaatagaaatagaaattaagcctgaaagactggtcctcttttccctcagaatatgcttagcccagcattcccataggtgctgatgagcagacctgaactgggaagccagctttagtgcctggcaggaattagaaatcactgagtcactgggtctagaagtctgttagggccatggcatcaggaaaccaatctggctctgatttgatcactgagagtctcactagctaaagagctgtccagtggttctcaacctgtgggtctctatccctttgggggtcaacaaccctttcacaggggtttcctaagaccatcagaaaacacagatattatgattcataacagtaccaatattataattatgaagtagcaatgaaaataattttatggttgggggccaccacaacatgaggaactgtattaaagggtcatagcattaggaaggttgagaacccctgacctatgcaataatactttttagccctcttcattttagaatcataaaatgttgcatcattcagataaacttctagaataagaattcagacttggatgtattaaaggaacatcaaccataaaggctgtgaaaaaaaagtgaagtactgtcattacagcaaaaaggacccactggccaatggaatccttcaatcagaaagtagcaggggtgggacaggatagcaaatggcttttagttccaatactaactcagcttgacagtgtagttccctgaacacaatgccttgagaaggattctgaggctaggcaggaaggcagagaaactaaagaacatgagttggcaggcagaaacaccagagtcaaagaggagcatgccaagctagagaaggcacccatcctgactggaaagaagttaccaggaacactacactctacactgaagagtagaaaaaaaatcacacctgttctctatacaaccccagtggcattcagtcagctgcctatcagatcttgatagtctgatctttattatttattaacttaaagaatgctatagttgacagaaaagataaatttaattgcgtgatttatcaagcatgtcagggttaatgatactacttcactgcaatccaggagctgtagcaaggtcatcaacaattagctggtcatcagattgtcaatgtaccgacactctccgtctaatgtaatgggctgttggtttaactgctgcctgctgcctccattatgggcttttggcctcttgatattttttgagcttagaagtgtgacattgcttttcatctctgtttgcaaagcccatcttcggctggttctaatagcctttgaagtgcctacttttgaacagttaacaagcacatcttgtgacagagagttgtgaaaagaagccatcgcctgccaaaatcatgatctgtaagatacaaaccaactgctctcaagttatctttctctacccctaaaaccattttctcctacttttatggagccattgatcatatagaatgcttatatattatactgtcttgaatgatacataattattttctatttttcttccttccttactcctggggattgaacccagggccttgtgtacatcctaggcaggatcgctaccacagagctacacctcagctttgttatttcttacttcatgtaaaaagctggatggtccaagggactgatccagacccctgaaagtggatgacaatgaggaggcctcagcacccgatggggcctctggtagtggatcagtatttttccctggtgtaagaagggactttgagagcccatcccacatgaagggatgctctctcggcctggacacatgggggagggcctaggcccggcccaggatgatgttgtggaatttggggagccccatggagggccctaccctctatggggagtggaggggggaggagactggtggggagggctggggggaggaaaggagaaggagaagggattgacatgtaaaattataattttgtaaaaataaaaaaaaatcagaaaaaaaaaagctggatggtcaatagctaggcaggaggtatagtcaggacttctgggcagagagagagaaagtgggagatgaatcaaggcacacaggagacaccatggagatgaagaaggagttggacatacagaaagggggagaggtaaaaaaccatgtggtagaacttatattaataaaactataggttaatttaagtgataagagctagttgaaaacaaacctaagctaaaggccaagctttcataattattaacaagactccatgttgttatttgggagctggtagcccaaagaaaaatctgattgcaagtagatgatttttaaagacagcaatatcgtagaatgtgggtaactgtgattactttctacactacacattaggcatacttcagtgaaaagacttatggttcattatgataatgaatatttcatactataacatactcatgctaacacctaatgaaactacaggcagaaaaatataacagagatctggaggagggaattagaaaccatttacttgaatgatttgagcatatttagctccagtcctttctacacagaaggccctgacatgtaacagttaaattccaaattaccccaatcaaaacagaagtgagggttccaagttgctcagtttccctgtttccctctgcccagccctgccctgcccggcagagtggtccctaaaccacggacactcacttaagaaagggaagttgaaccagacactatcttaggcatttctctgccgaaactttttcaacaccagactggaatactttcctcagatcatcccttcatgagaggcccccaaataaggaattcttattgtcatctgtaacagcccttgctagggtatcactctccatcctgaagagtgtacctcctacttttaataacttatacattcccataactaatcatttacattaatgtaaaagaagtcattagcaaacaaaggcttcaagatttgacacacggaatcatgggtattatgtaagccccagcatccattgctatgtataacttgttttaatgataagacattcagaaactcatagctccctcagacacatggctacaaagggtcattttccaaacgtccttattaaggatgaagttatacacagtgaaaagcactagcatccactactacagaaagatgtttgacaactgcatgtattaactagtacatagggaatgttctagccaagctactgatacacaaattgctgcttggctgaatttggtgggggataaatgcttattgcagtgggattgtaaaccagttctcattaaggcagaagaccttcctgggaggcttaaaagctgggaaccaggcaggctctaaaatcccaatgggaacagtagcccaaggggtcagagaaacattgctggctcccacccaggcacagctggggagccaggctcccaggaagcttccacccagtcacagccctgggaactcagcccatcacaaagcccagacattaagtgagcagcgggcaccctgttggtggtactcagcagcccttttttttgccaagggcttgggaagaccaagccagagagaagagctgaacctccttcctccagtgtgtgctctcgctgggttaatagcaagattgttatgagagcgaaaccggagccgggtaatgtgtgtaggatcggtggctttacggtgttcctgctatgttaattagtattaggagtatgatggattggcaacacgtgtgcgctctgagtcttaaaccagccctgagagtttagcactccattagttacacatcacagaaacccaggggatgtttattcaaaaagaggatcacttacaggagggaaacatgctaattcattcctgataccatctggggagaggaacaccccatccctgctcgtgaacagtataacccgtcatctaagatagggctggaattagaggctggcggggaactacagaaaaccaagggcccctggcctgggaaccctgaaatctcaaatcctcagttgttcctacgcgaatccctctgagacaagttcagagaaggctccgtgttgacatttcaatccactgggctgagttagaagctgggaactctacaagcctctcccacaccctccaggccacagagaagccaactcctgccctgccctccttagtgcccaggcttccagcagctgctgcctctcaggcctgcaccagctggacctgccccaccagagtgcacgggccaagaggactccagaggagagtctaaaaactaagatcctccaagaggcaggtgatcattgctgggctgttttgtactaaaatttataaaaactactaatctttctatttcaggggctgcttgagaagagaaaacaagctccattctgattatacatttctagagggcttttctttttattattttttatatttttgaattttattttttgtgcataaatgtgttaaccgcatgtattcgatgtgcaccacctgggtgcagtgccaaagggtgccaggcaagggtgtcaggtcccatacaactggagttatgggtggttgtaaactatatgggcgctgggaattgaacccaggtcttcagcactgagccgtctctccagacaccggttctagaattttaattctaccagagtaactgtagagacatgagcaaagacaggcatgattaaaatactaaggaattcacaaataattctagcttcacaataactataatttgtatgtagcatctaccaggaatatatcaagtaaatagtgatgtgcacacacattgttttgttttgttttgttttgtttttcaagacagggtttctctgtgtagctttggagcctgtcctgacactcgctctggagaccaggctagcctcgaactcacagacatccgcttgcctcttaacttttttttggggggggaggggggatgcacacacattaatacagcagtgcacttggcagtctaacactagctaaggggtaggaggtacagcagatctttggtctgcagtgttccccagttcctggtgtgaacggccccacaatggtccatctcccaacttgacctcactgcgcagagtgggggaagaggagacaccactggctcttgcaaaactgtaaatgtattaccagcatgccaataaagacagaaaaacaagaaagaatattagcttctcttcttaatctacaatgggtgtctccccccacccttgcccctgacatcagtccctaggatagtacatctgggctggaatccaagctctgctgatgtggaatattgagggtattttcttgtcttttccctcacttacaaaattaagactttggagcgtagcttagtggtggagtatatgcagagcatacaagccattgaattcaatgcctagcactaaaaagaaagaggaaaaaaggctgaaacaaacagaatcagagacagcagatggaagttagcaggggtcaggagaaagagaaacaggatgccgctgatggaacactataagccctcaatcaagttgagtgagtgtgctctgaggccagtgaactgcagcacggtggtgggcagagggagcagcactgtgctgtgtatctaagagtctacaggcaagctcatctgtctcaagcatctactgccaaaggagggtgggaacaaggcaacaatgaggcaacagtgtgtgtgtgtgtgtgtgtttacatacttcacgtaagtctgaaagggatgatgaactgacttgaagctttactaagcacatcctaaaacagtgatgttcaaacctcagtgtgtatcctggtaacccaggcaatgggctgaaacagctctctgtgctcataccccagcatctcagatagaaggagctagagtgggtttgggaagctgtgtttctaacacatttccaggcagggcctgaaactgcggtgacaatgacacagctggcccagagcccacagtgagagtaacatacttcaaaggtttcagaagacttcctggaggcttcttagcatcagccccaagaggccagagatattacctctggttaaagaccaaccaccaagtccccaggcccaaaaccaaggtagaattctagaaagatttcccctgaccttatagaacccccggctctctctctctctctctctatctctctctctctctctctctctctctctctctctctctctctctctcacacacacacacacatacacacacacacacacacacacacacacacacacacacacactgcacttgatcaaggacaagcagggagaattgccttacttcctcgtcgccatcttcactagtcagtggtgtccagctctgccagctccaggaaagaacaggcttgaaaagaccacacactgaagcagcaggaagaaccaatcagatctgttcctgagaacactgggcaggagaactccccaaagcccacccaaccatccccatcaagtgttcacttttgaatggctacttgtttcattagttggtcctatgggtgcctgatagaaagcctcaattcttatcagtgacagcaggggaagtcaactcttaggagagctgtgactcagtcctgcaagcagcagccaatcatcaccaatattgtgccactaacatttcataaatgtcccgtcttgtgtgccaactgagctactcctacttaggtagttcagacacatggacctttgtgggttcatctcacctcatgattggtatagaataattcagtacatatttacagtgtgtaatgatcaaatcaagaaaattggcatctccctgtcctcagattttaatcatttctatgtgttgggcagtttcagactcttctagttatttttaagtgtatcataaatgtcaaagactgtcagagcactatggaccactagaactaattcctcctatccaactgtattttgacaccgttatccaccctacctccctacctcctcccaggcatgagaaatcatcatggcttttcacatcactattctatcctgctaagtgattggtttctgctaacacaacacacaacctacaccccagggccaggccacagggtaatcacagccttgtgcttaaagtaacatacagaaaagccaggctcaccagccgaggaggagaatttgtacataccctgcctccatacccacatgagcagcctgggcaggagttcagctgctgggaagttgagacacatgctctgtttgttcagtcaacaaatagcactgtgcctgcccagcccacttcgaacacacatgtgcccagagtactgtgagcccaagtagggaccctggggaagcagaccctcccaatctgtgtggacctcagcttactaaaagatcatctgttatggttttcagatccgcctagaaaaccagcctaacattcccatctaactttaatgactttcttctcttccatgtagtagctctatgcgaatgccagtataaacacttccactgtgaccagagctcctaactcaaccctctctgcctgccagagccaagaaacactgactcaatccttcctctgctatttatttctactaggaaggtagttgttctctcccaaggcctctcactgtggtaatccctttccttcctgcagtaccctggccagctacccttctctccaaaggggagtgtggagggagccaggcctactgcctgtctgatcatccatcctgtggaataaagacacaatgacagaaatgtcttcgaggcatcattcacttcccactatgaactactcaaactactgcagagttcctatgaggaatctttcctagcttgcattttatgtgcggttccacccttctgttggctggcacattctcacggtttgtgtaaacagtcaagagaagatcagcagagctaactgcagagtatcagaactgttgaaggaaacaaaaaggaagacggctcagtgggtaaaggtgcttgcagccaagcctgatgacctcagttcaatccctgagacccacatggtagaagatgagaatcggctcctgaaagttgtcctctgactttcgaatgtacactgtggcataaacacacacacacacacacacacacacacacacacacacacacacacgcacacgcacacgcacacgcacacgcacacgcacaatacacatgtggcatgcacacacacatgaagaaggaaaggggagctagacaaagaaggaaaaagaaacaaaagaacacattagcagcagcagggttatacataagctgtgtgagtgctgtgttgctaacagaagacagaactgacaaagtgaccaagaggagtaccactcagatgcagagcaatatctagccccactggaaactccagaagtgcaaaattaaagcatatatgaacgcacgaagctagtgagggtggtgggaagccggtgctcacacgtggtgggagcttcggcggcggtgggtacaatccctggcaaagcactatggaaagacacagcaagagacagaatttgtttacatcctctgacctaggaaccctgcttctggaaaaggaagaggtggaattcacaaatatacggaggggaaactgctgacaccgtttttaagaatagaagcaactagtttgtgcatctctatgattttctagtcagcctctgcatgctgtcattccttctaagggtaatcatgagcaggtaccaccaaatatatatttaaatattttacctttaaatctaaacatgtcggggccggagagatggctcagcggttaagagcactgactgttcttccagaggtcctgagttcaattcccatggtggctcacaaccaccttgaatgagatctggtgcctctgctggcatgcaggctgaagactgtacacataataaataaaatcttaaaaaaaaaatctaaacatgtcagccttccaggatcattcgtgggatacccaaatcagcagagaataaaatgcccagagtataaatatcaagggaactgatgtgcatttaactcctcaaggcaactggatgtagacagcaaggcccagggctcccagtagcacagaagttacagcccactgcttaaggaacattgatctaagggtcctagaactctgaatctatgcaaccaggggcctccaaagcgctctgtaaatgtctacatggctcctatctctgggacagtaagggtacaggcaggggtaggagatggaacaccatggttctcagatggggttcattccctcaaaatacattcccttatcccttagtctgtgcctggccaggtacatcagctctccggaggcctcattgactgtccagttaggatgtcatcagaacccaggagtcacacaatccagacctttgacctcaggtcactgacctgccacaggctgatggctgcttgggcccaccttgccagagagagccccatgtgtggtccactctcccctcacaagctgatgtcccatgcagacacctgctccaggaagatgaatcagtgtcagccaaggttcctcactcaggaaaccacttctcttttctccagagaccctaaggtatcttttcagcaggacagaatccttcacttcctaattggaaataaaactcaaaggtaggcagagcttaaacgctggcagagatgagaattctttgtcacttttatataattatattacattattgaaattatgtatatggaattatattataatttcatgacgcttgcagatattagagacaacacttggtatgtgccagctattattctaagggttttacatacagtaacacacagaaacctgtgtggaaagtactgtaattttccatctcattaaacacataaggaacctgaagcacaaagacatgccgatgtcacacactatcaggtgaccttttgtctcagagggaatcaattagctcaaagacagaactcttctatgtacagatgaatgtagagtggcattatccactcacaacatttatagcagacagactggcttcaggatccatagccaggacaccattgggtggggggtgctcatgccagagtacacatgtggaggtcacaggactatttcaggtgtcatcttctttgacacaagccttttgttatcatctgatataaactccatgaaagtgtactgatggggaatgtacttctttgtatgtttatcttattgattattgaataaaatactgttttggccaatgagacagcaaattagacaggactaggagtcaaagaggattctgggaaatgtagtagaaaagtggtgatccaggcaggaagtgacatagcaaggagactcatatttaagcgaaggagaaacaggaagtgtcccttttccccttcctcctccagcagcacaatgtgatccactggcaaggagggacgccaataaagcgtccgataagtcttataaaatatatagatttataataattgagactgagctaacagatgagaatcctagtcattggccaagcagcatttgaacctaatacaagtttctgtgtactcatttgggccctaactagggcgggcggctggcgtaaagtgcacacgtggcggtggggctcggcggcttttggcggaaagatttattgtaacagtgtacaggcattctcctgcctccacctcccatctcaaggtcagagcactggccttgaagccaattctgggattctgaattcaggtccttacacttacacagcaagtactttaccactgagtcatccctccaacgccattacaccctttataaagagaatagtagccaaaatgtatatcaaagaaaatagccagtatatagtccttcctgtaagcagtccagggacatgggagaacctaatgcctgcaagacagagacatagaggtggtgattagatcagacctcaggaaacacagtttgccgacctcctgggtcctgatagtctgcttcttccagaatcaaactccttctacctccttcctcatcttcaagatcagaaataaactgttattaatccaatgacctatttttaagaaagtagtgatagtttctttctccctcaaagccttagattcactaacctaatgaatttggtgcaccaaaaccaaacctcttgtccactaagctttggtaaaggtatatgctattagctttcatggctctgatccacctcaggccatgctatcctacagcctggaagatcaggccccagagcaggaggaggcctgaatgggtttcccaaccattaacattgtcaggcagctcagggatgggtcagaaggaacacatacagattagactagcttgtcaattgcagtggcctcacctctatggcacatttctgcctgaatcataccttccacacctgtgctgtgttctcagcttgtctgcaggcctctgccatgccactccctgctggaagctcaccttcctctgagagcctattggcaggtgctccaagacccaagtgagccttcctgagcctcatatgaccctgaatggtttcccactttgactctggaagaaaactttccttgttcctctttttatttaatttgtagggaagtgttatttggcaaagaaaccaagggctatcatggattcttaggattgccagtttccatattgtcttggttaggatttctactgctatgagaagacaccatgaccatgacaactcttataaaggaaaccatttaattggagctggcttacagttagaaattcagtccattgtcatcacggcaggtagcatgcaagcagacatggtgctgaagaaggtgctgagagttctacatcttgatacacaggcaacaggaaatgaactgtgtctacactgagtgtagcttgagacctcaaagcctagtcaatgacacacttccttcaacaaggccatacctactccaactactgctgtcctcagggttgggcgggggaggggagaggggcagcctccagccacacagagctttgagaggaatccatgtcggtgtaagctagatttttctatctgagggaggtttaggaaaagaaacactcacacattgtcgatggcttctttattcctttttctttcgtgctcttcctgtgttccttctctgttctctgttctttctactgtatactttttttctacagcttatatatcccaacaaagtttttcaagaattgtaggaattaaaatgtggttacattttgtttttcaagtgaatgattacaattaatacaaaacaaactaaaaaaaaaaagccagcatgttttccatgtttcccttacatgattaaacaccatacatactacaggtgaaacacaaattatcccaagaacccacatacattcatacccaagcaacttgttatagattaaatgtgtgggcaagcaagctatccttgtcaggtcttttaccagcaggctgcattttgcagttacaagttaagggagaattactttattacatatcttggaaggtaatcttataaggaatcacaaacctaaactttatgtatgaaaaataatcagtcagctctactttaaatctttagggtacatatccactcatcaacagttttttatatcaggagattgagtgaagaaatgtgtataaggaattaacattcatttggtcatcaaccaatcctagcaaataaggtacatcaaccaacaataattgggctgctttattcattttccttgactttaacaagtttacattcaactatgtatctttctaaaactttagattgtcttcttgggtttttttcacctcaaagctatttaacaaaaacatcttagtctaactttattttcaaagctgtttcagctatgatgcactccaaaacctgtgaacacatgtcccaacattaaggttaaaaaaatttaaaactagccgggcggtggtagcgcatggctgtaatcccagcacttgggaggcagaggcaggtagatctctgtgaattaaaaaccagcctggtcttcaagatgacaggacagcctccaaagccacagagaaaccctgtctcgaaaaaccaaaaacaaaaaaacaaaaaaacaaaaaacaaaaaaacaaaaactagctgggctattgggactcaattgctttttcttaaacttgagctacaatctacacaactccttaggtgaaactcacagacctgactatgaaacatatcctcgtatttatttttattcatcaaaactctatataggctataattaatattattatcaatttagaacagtgcagcttagggaggggtcatcttcttgacaatccacaggttaaaatgtccagtagaacgggatgtttccaaaagataagcacactatattacagtcagtggaggtctcccctcatcaactcacatcatgctagataccaaaggaatattacagtaaaaaacacagaaaggcacaacagaagcaaaaaaacattttggggtctgtagtcctatgaccttgcctaagcaagatacactcatcagggagtctcctcctgacactttgaacttcagttgccacctgctgctcttctgacaaggccaccagcatccagcaaagccacagctcctaatagtgctactccctgtgaacttatgggagtcaattacattcaaactaccacatatatttatgattccagctctccaagagtaacatgtgagacccaggcaggaaggcttcattaattttatggggcataagcttgaatctgattcactgcatggctggtatgcacaggaatatataccaagcctctgaagcctagtcctgaaacacacacctctgaaccctccctgcacggagaatcttttctcgggactcactgaattggatgagagcagaaaagctatcccatgcatacagggctctcccaagggggtgagtcagccttttctttttcactgaaacaagtgtggatggggacaatcagtaagttcccagaactctaagctaagggaaggagctagaacagccatgggtcccactcacaccaacagagcaatgacagttaggaaagaaagagggagtggttcaacgacaatgacagctcttagattcaaggatggaaacggaggcacatctttgaggagaggttttcatggtacctcatagcagatgtgggttcaatacccagctcagttacgacagttactgttccgagctcccagtgtccttttctggagatggagaattaacaggcctggtttcctcacagggtgattataatattttaatttaaaatgagtgtgaatcatggcacatggtatctggaaactaccaagtactcagttaatgttaaatggcatctgttattattttgttttctgttagaaaatgatggaaattgacattttctcagctgtcaaattaccagtgtctactgctactgctttggttgagaggtctcttctcaactgggtggtggtggtacacacctttaatcccagcactctggaggcagaggcagatggatctctgtgagttcgaggccagcctggtctacacagtgagttcctggacagccaaggctacacaaagaaaccctgtcttgaaaaataaaaacagagagagagagagagagagaggcagaggggggaaagaaggaaggaaggaaggaaggaaggaaggaaggaaggaaggaaggaaggatggaaggaaggaaggaaggaaacggcagggaaaaaaattaagtctcttctcatggggctatcatggccttcaagaccatcctccctactaacagcaatagacagaacacacctcgagggcactgcacaactcagtctctgaggtccaaactgaacaaatgactggataataaaagccaggacactgcagaagaaagaaacaaaacatcagaaacatgctggacccctcctgtggggacaaagacatctgtttgttccatcttgtagatcttggaatgctgggacaggaggcattagggagaatgttgtttctatgcttgggaaggatgtcttttcaagtccaaatgtaaactactttgctggagcaaataattacatgataccttttaaggagtgcccctatttgtgaccctttgagggcaagttaattcctgatcggtatccatatcgcttgggctatttgaggcccttttgtcaataaaacaaaagagaaagaacaatgggtaaaagattttaacaaaaactttaccaaagatacacagaatggtgcaagctcataaaaaggtgctaggaaagacctactagttatagatgcagttcaaatccatagtaggtagtaaacacacttatgcaaaagctggaaacactcagtgctggtcatgacagagaaaaacagaactcacagtaagatgaaaaatggtacctgtgctttggaaaatatctgattgtttggctggagcacatttatcaagaaaaacaaaagcatgtgctgctaaaactccctcccttagcgaagacatgaaccatgtccatccctttgttgcaaagtcctaaaaacagaccaaagaatagtccccccacagttcaccattgagtttattggccttgcttaggaagcatgggtaaggggtttgcctgcaggagcatgggagacccggaaacagctgcactgtaaagtcctcgcccagcatggatgatggcttccctacagacaatgaaatgggcccccttcccctagtcctcccagcctgtacatccaaacccctcctgaaaccctgaggccacaggcaactagggcagaattgcacatgaatggctaagagaagtggctggatacttccctctaggtttgaatgtcaacagtctaatatgtgatggactctgcaagtaggcactgctgatctcatgaaggtggtggcagtttggctcagatgataaagctttatacaacatacttctacaaaaagacctctacacaaatacgcatagcaacttcactcctaatagccccaaaccggtccaatcaacagaggagtggagatctgggtccatattataacaacataatcctggctgggcgttggtggcgcacgcctttaatcccagcactcaggaggtagaggcaggcagatatctgtgagttcgaggctagcctggtctctagagcgagtgccaggataggctccaaagctacacagagaaactgtctcaaaaaacaaaaacaaaaacaaaaaccaaccataatcctgaagctggacagtgtgtagatgagccttttcctcacaattacagtggcacgaaggtccaaacagaatggatccagcattctggcgacagtcccctactacatcacaacagtgaagaggacaaagatgacaccaactaacaatttaagcaacagaggagaggctgccttaaatgccctccgctgataatgagattgatgactgacttacatgccatgctatagccttcattcagcagctggtggaagtagaagcagacacccacagctaaaccttgacctgaactggaatccagttgcagagaaggaggactgatgagcaaacaggtccagatcaggctggtgaaacccacagaaacagctgacctgaacaaaggagagctcttggtccccagactgatagctgggaaaccagcatgggactgatccagaccccatgaatgtggatgtcagtgaggagaccttgcaaatccatgaggcctcttatagtggatcagtacttatccctagcataggaatggatgttggaagcccatcccacatggagggaactccctgagcctagacacaagggggttggcttaggccctatcccaaagactatgacagactctgaagcccccccccatggaaggcctcacccttcctggggcgcagaaagggtatgggatgggtagggtgttagtgggggcggggcggggcagggaaggaggggagggagagggacctgggattgacatgtaaaataattttctttctaattaaaacaaacaaacaaacagtgaagtggaatatgatacacagaatgtaccagaagggccaagcgcacagatgaacctgatctctggagaaccgatccatcctgccagaactgcactcaccccttagcggagaggtgcttccatcgcctcatggctttctgtttagaccccaccttttaaatacccatcacttctcagtacatctggcaccctagaagacaaatctagtgcgctgagagcaaggagctgaagggagactgcatgagacaggagcataagaatggaacaattctcaggctggagagatggcacagaggttgggagcactgactgttcttccagaagatctgggttcaattcccagcacccacatgggggctcacaactgtctgtaattccaagaataaattattaaaaaaaaaaagaatggagcaattctcaatacatgttaacatttttattagttttttcaatgccagcttacaatgtagtggatttcattatgacatttttatatgtactgtttcttgttgaatctccgcctttactcctctgccctgtacaaacctcccttggtttctccaccctcgttaaccgccttcctattttttattaccctcccttcccccctccctctactctctggagatcttttttatccttctcatggttccctttcttgtttcatgatctgaagtcacacaagcacacgcatatataaaaacttaagattcacccgggcagtggtggtgcacgccgttagtaccagaactcgggaggcagaggtgggcagatctctatcagttcaaaaccaacctggtctacaagagctagttccaggacagcctccaaagccacagagaaaccctgtctcaaaaagaaaacaaaacaaaacaaaaaacttaagattcagaatctatatataaagaaaacattcagtatttgtctttctgaatgtggtttctttcacttaacatcacttctgggtccactcactttgctgtaaatgtcatgttttcatttttttttctttaggaccaaatacaattctgttgtatgtatgtatcatattttctttatccattcatctattgatgaacatctagactgggtctatttcttagctgctatggcaaccagcacaacaataaacatgctggtgcaagtatttctgtggcagaacatagaagtcctttgtagacgcattcaggaatggtgtggctggttcttttaggtttctgagaaacctccatttgactttcatagtggctgcagtttgtcctctcaccggccaacatttgttgtggtttgttctcttgctgatagtcactatgctcgggtgagactgaatctcaaaatagtttcaagttgcgtttcccattggctaaagttgagcacctttgaaagaattgactggtcatttgtatttattcttttgagaactatttggctcaccatcccacttagaaggctcgtttggtcttggtgtttagtttttacagttctttgtatgttctagatattagccctgaagtataactggcaaatattttctccagtcctgtagcatttctgtttgctctgctgatggtttcctttgctggacagaaacttttatatttcacataattcatctgtcagctcttggaattatttcttgtgctaatggatccttttccagaaagttcttgcctatgcctgcattttcaagcagctcccttgtttttctctagcaatttccagtcttatattaaagcatttgtttgtttggtttttattgtatttgttagggataagagatgtagatctaattttattcttgtgcatgctaatattcattttcccattttaatcatttttgaagaggctgtcccatttccaatgcctgtttttaacatatttttcaaaaattaagtggctctcactttatttctgggttctctgtgctgttctattggtttgcaagtctgttttgccaccactatactgtcttggtcacgatagctctgtagcataacctgcggtcagacactgtgctaggaccagctagcactgctaggactcttttcgatgtttctatgtgaattttagttttgttttctatctctgtaaattgtatcattgggattttcatggagatggcactgaacctaatctagtatcttcttcaatttctttctttggtgtcttaaaattttcaccgtagaggtcctatatctcatccattaggtttattcatggatattttcttagatttgtgttttattatttatttatgtgtgtgagagagtaatatcacatgtgtgcaggtgccggtgccacggaggctagaaaagagtgtcagatcccctggacctggagttacaagaggtggtgtgctgtataatgtgagtgctaggaaccaaattcgggatgtttgcaagatcagcaagtactcttaactgttgagatatctctccagcttccattttttagtcttcaaatgtatttatttctttagcttagaacatctgttagtttgataaggctagtccttatggagtatttcttgccaagttgtaaatagaaaaatattgccaataagaatttagtcttagttcgaatgtaaaaagaaattaaaaaattttaaaaaatggcaaaaaagaatttagtctaagaatatgttttcctatccaaggagatatatgtattatattataattatatataaatataatatatataatataattatattatattataatacatatataatacaattatagaaaagatgcatgctatatatgtgactggacattttctagaaaattttctaaaccctgtgaagaaactgagatacaacaaggacatcgtagttactaaatggtgggaagaaaagatcatgacccaagcaatgtggcccagaagtctgcttccttagttgctgtcctggctgcctcaatgagagtggatggtggtttagcctctaagccttttaagttcccagaaccgaaagcctcttgtgaagagatggctaagcaaggcagaagggggcacttcctaatgatgatagacaaactgccccaatgagaaatcattgaaaaataatgggcaactatgcacaggtctttttttcccctagaggcaagaaaatggcttgaaataccattggaaagtccctacccatccaggctgctactgtagcttataaagtttgtgtgctggataagggagcctcacatctgggtcacatacttattcctaaactagcaaagagcaaggaaagaaacttgagagtatatggaaagagggttgttcaaagtatgttaaatatggaaacagcctaatgtaatctggtataacagaacgcaaagaagatggtgagtgttcatagccaagtacagacatagaggaagggagggagggagggagagagggagggaggagggagggagggagggagggagggagggagggagggagggagggggaggaagggaggggagggagggagggaggaatcctcaggccccagacaggtctcaagaccccttcccagaagagaataaggtgggaaattagaactcaaaggccaataccagcttcacataatacaggcttttgttctaactggttcttaggagcagggttcaaaagaaaccagccagggtgcacctgatgtctcatttgtccttggaaatctcccagaactatgcaatagaatgagctagcccctttccaagcaaacaagcagaagggctgtcagggaacctcctagtctttaaggccttcacctgtcaccctgaagcagtcccctgcctgtgaactcctttcctacagtccatttttttatatatataatacagggtctctctatgtatccttcaatgtcccgaagcttgctgtatgaaccagggtagcctcaaactcacagagctctgcctgcctctgcctccggagtgctgggactaaaggcatgcgccaccacacctcttctacaatccgactctgctgtgcacacactgagcactgtttgccatgggccccaccccagcatctatattatactatacatgaactgacagaacatgattggcaaatggatagaagaggagaggaatggaaagagaggggacagtttaacgtgtccgtattccctgataacagttgccagtcacactcagaagcaacctgatcggttgaaggagccttgatgatggtaaaatgcccaatggcttcagaaactgcactttgagcctgccactcagccctggctcgaagataactctagggattgtccttgatgagtaattatttccaggtgccgaatattggataaatacatttgtcttcctagaaagttcaggaggttttttgtttttttgttttttgtttttttaagtgggaaactataaaactccaagtggatttgcgtcttctgcatcagtcctgctcatctgtccttattggagtaacaagatccagacaaactggaacactcattaatttctctctggagctggatttcctatgggagaggtgggtaagtgacattccaaaagagatttctgtgatttatgtctgtgtatccatacagtattcatacagtctttagagaacccagtacaacccatggaggctccttttgtctcattttgaacatatttcctagaaaagtaatttttgtaggcaaatttaaaaaataaaaaggagatagtattcaagtggaaatgtagagaggttaaggaaaatgttttccttggtttccaatgtttagaaactgtctcactgggaaacatatgcttctatacatacatcatacatctctattgtgtgtgtgtgtgtgtgtgtgtgtgtgtaaaccttcttcgtagtaccatgtgtgtcacaggaaacacagatatgctgtttttacctagcacaaccaaacaaggtttttgaacccaaagtggcttcctaagggagttgtcatgccctgccaggcccctgtgatctacactagctcttctgactctgagaagcctgtaaagaaacagaaaggctgtctccacgaagacagtagtatatgcttataaaatcccagcacatcatcttctttgaaaacatagggtggctttgcactggacagggagtcaaagcccggaactcagcctcatggatgctgtgaatctcaacctggcctcactggcgcgtcccacccatcccacctcaagtctgtggatgtgagtcacttcctcagaaagccttttccctatgagtcaggccactcagttccgacattgactgaatcttgtgcttttcatcagggtacttgccagcttgtaatctgtcttatctgtttttattctcaggtttgaatctactgccagacctccactacatgaccccagcctgatggggaatgtactgtgtatgtttctcttattgattattaaataaaataatgtttggccaatgagacagcaagttaggaataggagtcaaagaggattctgggaaatgtagtagattaatggtgatccaggcaggaagtgacctagcaagagactcatatttaaagaaagagaaacaggaagcgtcactcttttcccctcggctcctgctccagcggcacaatgtgatccaccggcaaggagggatgccaataaggcatccaataagataagtcttataaaatatataggtttatgatagttaagattgaactagcagatgagaatcctagtcattggccaagtagctttgaatctaatacatgtttctgtgtattcatttgggcctaactcgggctggcgtaaagctcacatgcagcggtggggctcaggcggcttttggcagaaagatttatcataacaccagcctcttttggtccctttgctatcccagttcctagggctcgcctgacattcaaaaggtgctcagtaaacattgatgcgtggttggctgaattaataatagatggacgtgaggttcactggccatcagtccgaggtgtcaggtacaggggcgctcactgaaaggctttctctaactgctccttcctcctttcttcttcagcaacgtgaggatgtggactatagacctgacttctgggtcccaggcctgagaagctctcagaatatcagccagtgccagaaagcctttcccctagtggctaagcaaccctccattgctcattctgctttctgctctctttaaaggggacagtgtgaccagaagtggctggtggcctttgcaacagcagggggatttgggagaggatgtcccagagtgcctccgtggctgtgagaaatggctgaagcataagcacaaggaagacattttggggaacatcatcgttcacctcgggagtgatgggttgttgtttttttcctaatgcttaaaattagagactacacacactcattttattttttattgggtttttgggttttgttctgtttcttggttggtttggtttgggtttttgaaacagagtttctctgtgtagccttagctgtcctggcactcactttgtagaccaaaccagcctcacaactcacaaagacccaccttcctctgcctcctaagtgctgggatttaagacgtgtgccaccacacctagcacacatacccattttaaagaaataaataaaagtgacatgtaaaggttacatgggcaggctacagaatatttaagggcagcctttttttttacttttttttatttgaattacaaacaagattgtattatatgacaatctcagttcccttcttcctcccttcctcccctatcatccccccaactaaaaccctacctatcacatagcctttcttctaatctacacccgactcaacctttctgctccctcatgacctctgcatccttccttttcttctctgaactgtaagccagatccaattaaatgttttcctttttaagagttgctgtcctcttttttgtggtgcctcctaggtggtcggctgtgtgaagatgaagctcagtatctccttccccaccatcagaaccaccagaaactcaagctttggacattctgtgagaatcgcatagccacagaggtagctgctgatgctctgggggaagagtagaagggttgtgtggtccaattcagtggcaggaatgacaaggttttcacataaagcaaggtcttttgacccatgacagagaacacctgctgttgattaaggggcatttttgttacagaccaaggagaactggagagaggaagcactgaggatacatcatggatgccaatctgagtgttctcaacttggttattataaaaaaaagagagagagagagagagagagagaaagagagagaaggatattctgggactaacagatactactggttcctcatcagttgggacctaaaagagctagcagactctgaaagctttttaatctctctaaagatgatttctaccaatatgtgggaaagcctttaaacaaaaaaggtaagaagtccaggaccaaaatgcccaagactcagcatcttgttacttcacgtgtcctacaacacaaatgcagtcgtattgctcggaagaaacaacgaacaaagaaaaacgaggaggctgcagaatatactaaaattttggccaagagaatgaagccaaagaaaatgccagaaacagatcaccaagagatggaggctgtccttactgacagcttctacttctaagtcttagtccagtcaaaaatatgcctttaagggtaacaaagaaataatcatacattgaaaaaaaagagttgctgtggtcatggtgtctcttcacagcaataaaaatcctaagacagaagtcaaatagggacaggggcctggatgccagctttcagggggatagcagtgttaatggggagtaagttctgcctgccagacgaatggcaatggctttcttccacagacttcgagctgtggggtggcctcctttgtggtaaaataccctaatcatatcccacccatcccagcctttcccatatacgtgtgtgtgtgtgtgtgtgtgtgtgtgtgtgtgtgtgtgtgtgtatacatatatattaacatcaaacaagtcttatatcccttacatgtagaccaatgcacaccttgacccaaattcttcttcaatgaagtaatgtctaacactgctctagtgagatggtaatgctggactggagaattgcctgggagttcatgggcaatctagtacacagcatagcagaagcaagagagactcagcctcaacaaagcaggaggggaaaaccaattccccaaagttccacatgtacacagtagcatgcatgttacacatgtacaccgtagcatgcatgttacacatgtacacagtagcatgcatgttacacatgtacaccacagcatgcatgttacacatgtacaccacagcatgcatgttacacatgtacaccacagcatgcatgttacacatgtacacagtgcatgcacatgtacaccacagcatgcatgttacacatgtacacagtagcatgcatgctccacatgtacaccacagcatgcatgttacacatgtacacagtagcatgcatgttacacatgtacaccacagcatgcatgctccacatgtacaacacagcatgcatgctccacatgtacacagtagcatgcatgttacacatgcacacagtagcatgcatgttccacatgtacacagtagcatgcatgttacacatgtataccacagcatgcatgctccacatgtacaccacagcatgcatgttacacatgtacaccacggcatgcatgttacacatgtacaccacagcatgcatgttacacatgtacaccacagcatgcatgttacacatgtacaccacagcatgcatgcacatgtacaccacagcatgcatgttacacatgtacaccacggcatgcatgttacacatgtacaccacagcatgcatgttacacatgtacaccacagcatgcatgttacacatgtacaccacagcatgcatgttacacatgtacaccacagcatgcatgctccctcacactcacgccccgtactcacatacattcacgacagtaatgaatatatttaaaaggatccaaattggcatttcattaaagaacagatacaaatggccagcaagctcacgaaaaatgtttcacatcattagccattaaatcattaaagccagtcactgtgagatgccacttcacactcaccgaaatgtccaggaaggaggaaaacatagaaatggatttttaaaagggaaggtataaaaattttctctggagccgagatcccagagaaaatagaatgtggaggggtggtcctgatgctggacaccctggccctcgggcatgttttagtactaactagtgaaggaggctgggaaactcggcactgcattttagaactgaggagacagaaacagggccttaggaagtgaagccctctgacccatgcagggtttctgtttcgacgcctctccacatgaggcctgatgcagctctcaccgaatggaaaaacctgtccccaactcacccaacccagcctgccacagagtactgactgcagaggtaaaagactcaggaaactcagcagatacaccatggggatcaacaagggtgctcagcaaaggccctgaatgaacaggtgaggtacaaggctcacctatgtgtatgtaggaggaagaacacattgtggaatgaatgttttcaaactataccatttatgataacatcaaaaagatatctggaccaggcatggtggcacacctttgatcccagcactcaggaggcagaggcaggtggatctctgtgagtttgaggccaacctggtctacattgagacagccagagctgtcaggacagccagaactacataataccctgtctccaccccgctccacttcgcccccccccaaaaaaagatatctgggagctaaagagataagagttaagagcaaagactgttcttacagaggagagagttcagttccaagcacccacagcagagagctcacaactgcctataattctagcccaaggggattgaacaccactgcccttcccctgaattcataggcacacagtcacacagacacatgtgtaatcaaaaataaaacaaactttaaaaaggatgtctgggaataaccacagaaaacacataagacttctctatagaatactataaaacattattgaacatagtgaaactttaaatgggttatgagatatagtctgagctgaaagaataggtatcacagagacaatcagttcccaaatgtatctgcaaaactttcgcaggcactgccaaggggaagagcttagtgtgagcccttgctgagggcactggactgaacctccaggaccaagcaagtgagaactaggccgaaccttcaagactgatcaggtaggaactgggctgaacctccaggactgatcaggtgggaactgggctgaacttccaagactgaccagatgggaaagggagaaagccagcagctttaattattctgatgagattaacaacctaaatctaaaactcatatagaaatgcaaatggctgagaatagtcaaccaagtcttaacaaaaccaaagggttcatatgacaagatccaaagacaaattatgaataacctaagacagtgtgataccacatgctgacaaaacctgtggacctagaagctgaccagaagctacccttcctatcgtcatcttacttacaccagcagtgtagagcattgaggaatggtccctccggtgaggagtgctgtatggcaggctttcttctaggccaccaaccagatcccaaatcatgatatgtacacttcttattggttatgaaaggtcagccttacttagttcctattttaatctggttgtctttatctacattttgccttggggatttttacctttctttccttttgtatatcttactttcactgcttctcgtgtctggctggatggcagctgcctgggttctggtcctgggcatgtccctctctttctccctcaatctcttcgttcatcctggtcctcgtcctcctcctcctcctcctcctctccctcctcctcctcctctctttctctgtctctgtctctctctgtctctctcgcctagatttctcctcctactttaggaaggcaaggtaaaacaaatgcaactcatctttacacaattaaactaatgcaacacaaacaaatgtaacacatccttacatcattaaacaaatgcagcatcgacaaatgtgacacacctttacacagttaaagtaatattccacagcagagacaaatgtgacacacctttacacagttaaagtaatattccacagcagagacaaatgtgacacacctttacacagttaaatattccacagcagaaacaaatgtgacacacctttacacagttaaagtcatattccacagcagaaaccaatgtgacacatctttgcctattacgcaacagtgctaggtcaactggaaatgcaggctgtggacaaatggtctcaaaccctacctcaccctccaccaaaaatcatttccagatggactacaattctgtgaggtagtgaaagttctagacgaatacacagactgtcttcaaagtggtggacatgatttaaaattaagaattatcaacatatccacctagggcctcaaattcataaaatataaaaagtgataccaattaataagaaaaagaaagatagccagttttaatgactatggaaaaactatgaaaggaaaaactgacaaagatggtacacaagcatgtggaacagtacccaacagtgaaattacaggaagatagtccctgaacacccccagaatggataaaattaaaaagacggacagtaccagctgttggcaaggacatgcaacatctgtggcccctgtgctctgctaagcaggacaaatccacatgaacacgtgacctctgcctgctcacgtctgcttctgtgcatatgcacaaccctagctccacatgtggtcaccaaagccatgttggtagaagccaaaactcagaaacgccacatgaaacggaaacagattacagttcggtgccagcaggccagtggaggcactgcaggcagcagctgagtggaaggcagtctatgtgaagtttgagagtacttgccccgtgtgaccggagccccaacacacaccctacactcacaaaaagaaatggaaagaaaatgacctagggggagaaaaagagaagttctgaggtaccagggaggttttgattctgacccagatgctgaagacatgattaaattcatcttgcagaataatgcattttgctctacagtgatggctgtgtgcatgtacgtgtgtgagtgtatgtctgcctgtttctctatgtgtgtgtagctttttttatattatacttggaatctgttcttaaattgttgttaatctgaatttcattgacttttttaatatttgtcttggtttaagtcttgtgaaagtcaacagatgcagggatacaaaaaatatggcaaacatacatatgtagagttttattcagttatggagacaaacggtattgtgtcatttacagggaaatgaatggaactggagacggccaagttaagagaaataaacgagactcagaaagacaaagaacatgttttctctcatattcagaatctacatttaaaacaagctatgaaagtaaaaagggaactatgtcgggggaggggtctgtggggggaacaagatggtgaaatgagaaggaaaaagaaacacacaatactctccccaaacactggactataaaataaatacatatataataaatatatatgtatttattatataatacatatatataatacatatatatgacaaaggagaagagggactatttatggggaacaaagggaccaaagggacaaggtgcgagcaagggcaatgggcagtgaatgtaagcaagtatgataacgcatattatgaaaatgccacattatagccaggcagtggtggtgcatgcttttaatcccagcactcaggagtcagatctctgagttcaaggccagcctggtctacagatcaagttccaggacagccagggctacacagagaactatctcaaaagaaaatgaaagaaagagacatattattttgtatgcttgctaaagaactttttgggaaactgtgaagatacgaacaccatatctaattgcgctcgaacatcacactagaagaagaataactgaagaaggcataacgatatatatatatatatatatatatatatatatatatatattatatatattatcattgctgaatgaggctgtcaaactattaaaacatcaactctgcatctgagtgaacaagcttttgtgaaccacccaatcattgctggctcttccattctggcaaatcaagatcagggattcaagcttcttcaatggcgtccaagttcctccctgaaaatgtgtcctgctgggcagcggttaggttggttgtctgagaccacatgtgctaacggtgatccaagggttcctggttgtctattctcacctctgctttacatgattcacttgtcaccattcacctcttaatttgacttcaacgcttttgttcctgtgtttgtccgaggatgagaaggccattccatatctgaaaaaagctggactcgtgctctgtaaggaagaactgtgctggcaggccaccatccaggctatggaagggttctggggatagtgcgatcacagcagaagattttgccggggagggaggaaagttccatcacctgctgagactcttgttgactggttggcagctgggggcatgtatagatcccctcagagatgtgccgacttttggaatggaggcagagggtaactcacaagccccatagcctttcctcagacagctccttcctcagcaagtttcctttctttcctgcaggtgtggataccagcaggggtctcagacttaactgctggtcttctgtcctaggagaccctctggggggggtagaactgagttggtgggtgcccctctggttcacaccagaatttttggtgtattttcttggccactgggttttaatgattcattgggggaatctgcaccgtctactttgattgctatcacacaaatgttgctgagatcaggtggttcatgttgcctctgtgagatctccagccaaaatcagtggtccagcttccctgtgcatcgttatggggaagtttatctaactcaggggttcaacctgtgtgtaggtcaagaccccttttcgggatgaactaccctttcaacaagggtcacatatcagatatcctacctatcagatatttatattatgattcataacagtagcaaaattacagttatgaagaagcaacaaaataaatttatggttggggtcaccacatgaggaagtgtattgaagggtcgcagcgttaggaaggctgagaaccattggtctagaactagcttgcattggagaagaaagacctgagaccacacttggcagaaaggttgtggatttagctggccccgttctcttggaggtctgatggcctcagactgtcgcggtggtcactgccatcccctcagtgtggcagaattctgcccgatgcagatacagtaatggatttagacagtgctttctcaatgttgacctgagacacgagtgagctcacagcatcaacgagtaagagacaacttaaacattggatcttgatgttgtccagtcctaatcacagagacacaaacttcacaaaatgtagactattacctactttttctaaaccgtaaacagagctcaatggtgatagcttgagtcagtgcttccacctggcaccagctacaaagtcagaggcacaggagtgacatgggaccgataagagaaaaacagcgagaaataggccatcatctgggaaactgtgagaggactgctcacccaacatctgtgcttttccttgtaagcatgaaaagtcaccgctctaacgcagaatccttaagaacgccctggatatttatcagtaggatgcaaaacccaaggccagccaaattgtattttctccctagcaccacaagatggcgctggaagcccgaggaacgcacagcgcgagcgtggcttttgtctcagccctactccaggcaaaatgcaatctttagacctggcagcccgagggaaggttcctgagaaaggagtgaaaagcaactctgccaaagctggttttcaccagacagcaactgctgactttcattacgccctattaatgcccatctgaagggtattctgtggggtggggtggatttgaggatatctggaccacggcagatcctggaggactttgtgtgtctaaaagccctagtgatggtgtgtgtgggggggggggtccattttttttttttcactttttaaaacgtcttacatttgttcatttattgtgaatacccgtggaggtcaaaggacaactttctggagagtaggtccccaggattgaattcaagtcaccagacttggtagcaattgtcttttcctgctgagccatcttgatatccacccacagacacctcacttttcgtcaaagttagcatatattgagaggttaagtgaacagaaatatattaaatattttaagttcattatatcacttgatctttaccccctggtggccttattgtgacttcgaaggtggggaaactgagggctccggagaggctcagagcatcaccaatggagatggatgcctgtctgatctctctccaaagcctgtaaactaaaatctctttggtctggttcctgccaatgaaactaatgctctaatatacacatgcacactgtggacttagtctatgtggcaagcaatgagaaccttacagggtactgtgtgtctgggggagaatgggtacccatgacaggcacacccaactcacttctgagcaggaaaacttccccaaacagtcaaggatgttaagttgggtggtggagtgctcacttagcaaatgctaggttaaattcccagaattaaaacaaactatgatggggggtgaggtcagacagcactgaagacatatctccgggagcagagtggctctccagcacgcaggaagccctgaaccacagcactacatacgtggagctcaggggcacacctctaacaccagcacccaggaggtggcagaacagaagcccagggccaatctcagctacacagagtttgaagccagcctgggctacgggagactctaaataaacaaaacaaaatcttccagaacatattctatttcttccttccctgtctcagttcctccttgtgacatgaactactccacggtgaccataattctaattttctttggggggaaggggatgcagatattacatgtagaaggaatgacaaaaattaaaaactttctcctgaaataactgactcaagcaacgcagtacagtctatgaattcattacgagaaaggctgaggaagattgaagagggggttggtaatggagggatgggctggcattcctgtcccattggtcttgcttagtgggacgaaggacccctcctccccttctgaagtggtacagttggaaagggccccgagtcctgggaaggacactaactcaaaccctggggcccacactgaataaccctctagaacagtagttttcaacctgtggatcacatatcagatgtcctgcctatcagatattacagtatgattcataacagtagcaaaattacagttaggaagtagcgaagaagtaatttgctggttgggggtcaacacatgaggaactgtattgaagggtcacagcactaggaaggttgcgaaccttctaaccactgttctagaactggcttgcattggagaagaaagacagtggtggttctgggagccaagtgactacacaaccagagtggaccgtgatccttagcgccagctgctatctaacatgacttttaattcacaccacaatggtgctgttgtcagtgtaggcatgtccatttttagagttgtttactagtgtttatgggtgacatggcattatctgctttagtgacattacctattcacccaaaaggaacaaagacagagagccaaggccatacagtacaggtgcttaacagtgacggcgtgtaaacagagattcgtctccctcttctatttgtgagttattttctcagaaaagttatgtttatagttagtcaaaaagagatatgcttacttccatgatactaagtggaacaaaaaaaagaattccatgggccaataaactttgacagaaaatgggagagctcacgggggtaggtacccaatccccttaccaaactgctttgcatttaaaagataagcaccatcatcctaggtggctgttactcaatgactaataaactgaggagactaacaggccttgcatatggcaccaactctaggcccagcatggtggtgcacgcctttaatcccagcactctggaggcagagacaggcagatctctgagtttgaggccagaactcagagcgagttctgggacagaggacagactccaaagctacagagaaaccctgtctcaaagaaggagaaaaaaagataccaactctaaatattgctgtttgaccacagtaagttcggccaactttgagcctggtctgtgggatccccaagactgcaatgcttgatgtgtacagctctaaaatgtgaaaatctgtgcaccttcattcccggtgagaaaacacaaaatacaccaggccgagcatggtggggctcccctgcacatcccagcatcccggaagctaagagttcaaggccagcctaagctacaaagtgagaaccctgtcttaaaactcagaaatgaattattggattaaacagaatacttggaaatgggggggggggttggctaaacagcagagtactttcccagtgtatgtgaagccctggattgattccccagctccaaaagaggaaaagacaaggaaagggaaaaggagaagggaggggaggggagaagggagaggaggggagaggccatactaagatgttcagagagtgaaaaatcaacactgtaaatcgatattcattgaacacataggaaaacacagactttcttggtgggaatcaaaaccagaacaataacagcaggggacaatttggcagcagtaaatgagcaatgtatgtcacctctggcccggaaattcctcttttacggatatatttaactcatacttgctctggcctcaaatcacgtctaagattgctcactgttatcatttgtaatccacgatatgaaaacatacctcactactgaggaagccactgtagacatggaacagtcatgcacaatgaagcaatatgcaaattttaaaataatatacttctcagtaacatccaacgaccttcaagagagtggggggcggggcaagggagaacaatggtccaaagtgtactttcccagcctggtatccacgaagaggggggagtagaatgcttaggtttctctatgcctgaacgtcttctggttcccattggctactttcagggggctggaagaggaaagaattttcaccatgaaccctgactttatattcccatagaaactctgtagatgtttcgacctgttcaaaagataaaaccaaaagaagtggctgtttttcaatttgagcgcgtgcaggaccgcacacggctggggggggggggcggtgtactggggctagacaaggaagctggaactatggctgctggaatgtgggccgctaagcagcaaaaagaacaaaacaaagtaaaatccccctatgggagggatactaatccattttacatcaaattaaaaccacttcaccatacccagtcaaagaaaagcatgtggatttcttcttactcaggagacatgctgctctccactctgctctgaggccccagagtctactcagaagcctggactgttaaagcccctgaaactggccttccccaggtcagcccaggcaaaggcacaggagccaggctctatctcacacccagggcaaagggtaggtaatgggttccagtttcacaccagccatctgtgacccaaagtgacttagtgactccgggccttctgcacacatagacaatgaatggctcagacagtgtgcaggggaccagttccttcccttaacccagttttcaagtgggttaagggaaaggaaaacagcctgttttttaaaaaattctgcaaaatagtttcaggggattgcacagtaaagagaaaggactgtgtttgccgagcttttgtgaggatgaacttggtgagggttaaaacaaaggtcagcccttgggtcaggagccaggtgacttaaaaatgcccccaggttataggagttgtagaattttccccctcagtggctgtcaaccatgataaagctatagccatggcatttacacaccacagatctgtggctatgacgagccaccggatggaggatttgggaaagggccacacaggtcacctactgaatgcccttgtggtggtgagcctttgggtgtactatgtgctcctctctgcccttcctgaacagccttcaagttctcttctgctgacagggaagccataggtggagaggtcagtgccccaagggagacacagaatcccgcctcactggctagggagctgccagtaccatggaagattctgtatggatgtgacttaattgcataaccatagacattttggggttatggaacatgaccaagacttgtttacactaatatctccttcctccctcctctttcctccctcctccctcacctggtgtctctggaggcagaaatgagggttctgcaagtctttttaatgcagccatatgtgtttatgactggatcctggtttctgagagactcagaaccatgttaaattttaggcctgtcagacatcataggctggtttaggggtgtcattttcttgggtaggcaagacctttcaagactttggatctgcagaagcaaaaaacaaaacaaacaaaaaatccatttggaaatttagatgcccgtgcccttgttgtagaggggggaaaaaatggagcatcaaagggaggtgtcactctccaagagaaaaatgaaaaagaggggtaagcccttcacacacagctcaggtgagcctgctccgggacagccaccaagcagggattgcagtaccaatatacaaccccctcctccagaaagccaggtttgccaaatgcatctgtcttgaattcagtcccaggagccagacatgagtggggacaggtacaggccagcatgttcccgtgaagtatttccacatctctggcttcccaggaaagtataatacaaggtctcccagtgtgtaaatgatagcaatcgtttaaaaaggcaacaaaacccccacagtggctaaacaaaacacatccgagggctgactcgggcctttgggccatttagctagactcttgcctgctttgcttcctcacactctggggctgtgggtatgatcacagaacaggcctttctgggaaacttgactaaaatcagcaaataaaaacacagttaacactgaactacagcaagaacggggggtgggggggggcgctggagaaatggctcagcagttaagagcaccggctgctcttccaaaggaccagggctctattcctagcatccatggagcagctcacaactgtctgtaactccagtctcagggaatttgatggcctcccctggcttcctgagcagcaggtatgcatgtgatgcacatacatgcaggcaaagcactcatacacataaaaataagtactttttaaattaataaacggagaaggaaacagtccggaaatctgagaaataatagtgtttgggggctacaaggctcagagaaatttgccaaagcctctgttgggtgaatgagcgcccgggacggtgcagaaatggttcagccctatctgcagaaacctgtcacatgggctagtggcttgccctccagagggcagcactaccctctctcccctggtccctccatcctcatgaggcaggcacactgccctcaccaagttcttcccaagggcactctggctctctgtatcctttaccacctactccttgtggctgcagggcgacgatgcttgaaatccagaacactgctgctatcctccactgccctctgcccgctcaccacagccagaggtcccagtgtggctccagggtcacacactctgggagcagggtcccagggcagaaaaacttagttcctatctgaagcctctactacctgatactgtgcgccctgttcccggtggagctgaggtgaggtgggcagccatggagcagatacggaagctccaggccactcccatgacctggcaggtgggaacatggacccggcagaaacctgctcaaccccagtctccatctcatcacctatatccctgcccctcccccgtttctgtctctgcctccagtctcagaaggagcccctgtaagtcagttgggcccttcacccacatttcagagtacatcctcactccaaggttttttaaaaattatttttgtcagggtaatttgttcttgtaattgaccaaaccaatctctaactgtgaaaggcaagtaatcgcccaagaacgtgatctacttgatgttcccagacgtttctgaacaccagagtcgcccaccccaccccacacacacacataccttatacaagcaatttggatatattcacacctgctaacctgagagagcagcttgttcctctggatacaatgagcaatgcagtctcgaatactaggactggaagtctgtcacttcctcactgaagggctggactgttccctaaggctgttctctggcaggactggacctcagtggctctttttacaactcgggattcctcgagggagggaacgtccacccttggagctataatatagattatacagattattatctgacacctagtaacgtgtcaagtccagggacatacaccccccacttacctcagtccaagtcacttccagccactgctgttcattgcctcctgggggactgggtatgtgccactgtggcctcaatcacaaatgtcctgatggggagatccttgactttaaaggggatgaataaagattttgtatctatttcttcgaaatgacccatacatttcttgtttgactaaaggaaaaataatgaatacccagagagaaaaatgctagtttcgctccttccctccactgacccctagggggcagcagagctatgaaaaacgctaacagtgacgatggccagcccttcaggctgtggctgctacaggatggacaaggagggctctaatgccagcaaccgctctaatgccaggaatctgctgccatccacctctgaggcaccactctcaacaaccatgcagctattgccttcactgatggatgctttccctagcccaagagaaaacaccctggttgaacagaggccaatcactccaaaagccccatgacccccagcccataactgaaatggaaacccaccaccactcccaggtagctgaccttgggcaaattagttctttgttttctatcaaatgggaatagcagttttgaccagcctcacatgatcgccaagaggactaaatgaaatcgcttaggacagtggctaacactgagaggtgtcatctaaacaccttactcctatgtcccataataccaagcccataccccataataccaagtctatagtccttacaccaaacccaaatcccataatgccaagccacttttggaaaacgaagtttctgggggaaattggttaatttgcgtttggagtgaatttagattctcagatgtttcaaaatagtgctatctagggggagctttgaggtgctaatctgaataaattgctgttgagttaatcagactttccctgttggtatgaacagcaagcagtatgtgctttgcatgcttctaattttcaagactctggctataacaaggtatatttcatgagtaggctgcatgagacataatgtttctggaagatccggaatgtgcagcagattgtgactgtggatgctattgtattagagaaacggacgagccctctcagagacagaatgtgtaagccagtttgctgctgacatttgcagtcatcctcctgttgtttcccaccctgttgctcacacagccccaaacaacatctgtccagttcggtcactgggagcctgatttgaaaaaaaaaatcattagaaataaaacaaggtcagaatggagggctagcctgggctagcatgcaacagagcctagagcccatccccagcagttcaaaaggaaaacaacatggatagctaagctaacagatgcaagtagtggcttctcaacccaaactagctgtgcatctccccttcctggaacttttaatctcaactccacagagtgaaggttggttttgttttgtgttaagcatgaggtgactggaaaccacttcctattttctcagtgggaagaggagatggggtgaaagaaagtctctttgtccacagcccacggctttttccatgctggtgctttcagctattctctttcagttcagcccccaggacgggctggctgcagaatggacaaggaaggttcccgatggtcccattgccaggattctgccctgccaccgtcagcctccctattcattcactcttggtccatctccttagcttttcctagggcacctgctagaccttgtacaaagtagagagaggctcctaagccaggcatggtgtttgcagacctgtaatcctgtcacccaggaggccgatatagagggatggagaatttgagcacaaaagtaggactatctcaaagagaaaggaggagaaaagggtgggggaaggtgaggggagagggaaagttaaaggaaagaggaggggaagggaacaggaaatgaaatgacctccccccccacacacacacaaaaaacaaaaccagcgtattttctcctctgaaaaacttgagaagggcactatcagactcagggcctcacctgaccccttggctggtcttgatgcaatccacagaatgagcatgaacatctctcccccatggtctatggtggccagtacttcctaagacaaaagccaaagaaggagagtggcctccagccagccagcaccctgctggggaggacagagccccctggcatctccacagtagccttcaggctaagcagaatcgccagcccaactctcctgctctcctagcagctgacccacatctggttctgccgtaccagactggggggcacagactccccctttccctctgccaactctgcacagacctctgggatttttcatctaaaccccagtgtgagtttgaggtcatggtctaaaaaccatgaggcagtgactctgatcttctggagagatacattttcttaacaactgctgagtttactttcggttaagcccagcggctttgcccgtgggatatatgaaactcatgacagggcccaacaactccagccaactctcacgatccaattagtaaataagcaccattgtaacttaaggacaagccactacccttgctatttccccttgacactgagatagtaagtgatactgtgggaaccctgaagcctgctctgcacagaccatcagcaaaaggcgagattgcctcttccgaggctgctctgccctggaagattggaatttggggaggatgcattcggaagtgatttttcccctagcgatgacaactttcagtatcacataagaaatgaaattgaagcattgatcttattcttcaaatataggatggcttcagtattaaaattaacatataaatttagcatccatcttcttcccgccttccttctgctgagtaaatgcacatagaaagaatgaatcactgagacagtatgcagtgaaatcaagttcatttttcaaatatgtcggttcaaacgcagccagagcctgtttcctgggcacccaacaaatgttcccaagatgcccccctctcaatgcctttgtccagatcgatacacagggcaagctggaggaccttgacaggggagtcactgagaagcaggtcctataatatctggttgtcgcatctcttactctctttcctattgcagtttcttttcataaaatttgaatatgtaaaatggctcattagaaggcttttagttaacctagaaaactccaccaatggtctagaatcacccatgcctgttacctgcctgaccatctacaataatgtaggcgcacatacatgccttgcttcttccttttttaaaaaaggtttattatgtatacagtgctctgcctgcatgtatgcttgcacaccagaagagggcaccagatatcattatatagagagttgtgagccaccatgtgattgctgggaattgaactcaggacctctggaagagcagccagtgctcttaacccctgagccatctctccagccccatgccttgctccttgatgcacctatggaactactttcaccccactgtgaagattgctgctactttttcaaaatctaaggcagcaggggaaattttattctcagatgtcaccagtaacctggaaattgtggaataactagaaggttgcacagccccagaaagaccagactttccccggggcagaaagggtaccacacatttatgctattgtctggtcctttaccaatgtgaagtttccagaaacaggcatttctgtctccaaatgtgtacccacctagtaattgacccagacctcaaagctgtgtgcactagacttagggccagcgctcagggccttacacagtgaggtctaccttaccatgtgagggtagactgaaaacttcagcatggtacttgatgcttttactcagcataggactgagacaagaaaccatgctctagtctggtgagttcacaagttacgcaaagatgatgataaaatcatactgccccatctgcctggggttggcttaagccagaatctgttcaggaatttgctttggaaatgcagccccaggatgcacaaaccactctgaggcagaaggatccatagcacaactaacactcgcaaaaccttagctgactggagaaacagttaactaaaattaggagtagacaggatctcaccagactgaagttcaatgtgaaatcaacgtctaatcagacaggatggacttccaggtcaaatggatgttgagtattggaagtccacagccaagctggcagatgctatgagacagttggaagtttatctgaaagcggggtgatgtccccctgatcacaacatccagatgttcagctccatgggaaagagaaactgagtgccgtgggcaggttcgttcagcttcctggagcgctacatgcttctgcttcggcaagaaggactcagaaatctgagtcccaatctaagaggctctgcccctctagggggctcagctattaggaatgcagagagaaccggctataggagcctagcaacccatttctcactccgagagccctgcccactctcttctcaccaaaatctctctttcctcaagtggtaacactgaggggaaaaggaataaacaaaaagcagaccttcacctgctcacaagtagacagctgcacggttttaagattgttctgttcctctgtccatcataaaagatgtctaagacattgatgatccagatgtgaggatatgcaccaggcaattatgttccaccagggaccattccacctggagaagtaacatctagaggcagccttgatgacggcttggttcccacgggagattatcaatgcttgtcaaatgtgggcaaaccatgggaatgcaaatgtcttttaaagcacatttgccctggacagacatcagtgccacatcatgcctttaagttcaaagggcagctcattctctcctccacttctgtcttacagaagcatcaatgcttacacggagcctcaacaacaaaatgctatttactttcaagcaccctggtatgtaactatgtccacgaaatccatagcagtccaatcaatacaaggaatttttctcatgcaaagattactcattccaaaagcaacaagattcttttgaataagacccatttgccagagctgtttgggcttggaggtatctcaaggtgaaagtttgcccttctcccatcactcaagagcccttccaagcttactcatgggggtgctccacgaatcctcctgtgtagaggcttttgtgctttgacttactttcccttccagattcagaaggttcattacattattgcctgacctaagcagtcatcctgattctagggcatttcaaagaataaaaacagtcatggggttgggggtgacacactgcttgaaatttctcttaaagagttaagtgagaagtttaccacacacagcaagcccaagaaggctttcccaatgaagggagggggaccctaaatgctttgccttatactagaattggccaaatgaaaatgggggaattcacacctaaattctgcatgtgagactgttggacttcggggagcaagtgttcaggtacttcacgcccccagaggatttgtgtcagggctttaccagaaacacctggcttctttctctcactcagttggacactgttggtagtttttttgtttttttgttgttgttattttggttttttttttcattatcaatgtgtcttgttgctgtgatatggtttagagtgctagggactgagccagggcttacacatgctgacccttaagctacaggatacacccagtttaagacttgtcccattgcacggtatctttgtttcagacctgtgcattagtagagagcttttaccagagactctgtgtttggaactcttccttccacaagtagaaaagacatcgaccaagaccgtctccttagtttatttttctagagtccttagcatgctacattaacctgacaaagcttaagcttgtgttcatttcacgatacatttcatgcagttcacagctgtgatgggttttatattgacatgacacatgtttcaattcagccatgtgaaaagaataactcttaatggagtttgtctctgaaaattgtccaggcttaaataagcggctgcacagtccgctctgtccccaagtgcagtctctctttgaattggagcagtatgtccctgttcatagttggtcagcaactgcaaccggaccactccctaaggtttccggcatcctgaggaatcctttcacaaaattgcattcaagtatactatttcacttaacattccaggttgaatttaggagtaaagttgaccctccaactaaatctccccaggcccagccttcttaggcagtccttagctttagactcatctataacactcagcacgaaatccacagagcagacctatttggcattctccagtgcagggaattaaataagttatgtttttattgctaatgtatagactatcaagcacagtcactttgtcaaacaggaggaaagagaatacagtattagtggactctcctgggtggagggggggtccagcacacacaaaatgccacttggtcaccacccataggtaacactttaggatgatgtgttgagtattctagagtccgaggagtcggatctctcgtcatagtcatcctctgtgtagatgggctgctttgtcacgattggacacccatcatcggggatggagatccgagggtcctctgtggtgcgggaggagagcacaggcgagctccggaagacactggtggagttactagggaaggggctgacatactgggacctcagctggtactgctgctgcagcgtcatggtgttccacagggtgacatcgttgggcaaaaaggggcttgactggttcctggccaaagtattcctcagcatcaatgggtaccggggtggctgggggaaaggatgctgcaagggcacggccaaggggttggggaccacgttgctggagtccgccgaaaagcgcaaggtgtcagggactcggaaggcggagcccaccgaccacttggaggaagagatggggtaggagcccagcgtgtgttcaaagatgtggccgctggagggcagcacgaggctctcttcggccgtccgctccgccccagcagccgaggaccgactggacagcaggacctccaccgcactgaccaggtcgcccccgcagcctttcagaatgagctccagcacagtgggcttctggttggggaagattttcttcaacacttccaggggtggccggttggctttcaaactgaagggcagagagacggtccccgatggaccctcgatcaggaggtggctctgctcagcgtggtacttggggctgtcagggcagctttctgggttacccccgtttttctgcacagcgtatcccccttcatccacggacacgatctcggggctctctggagtgaagcagttcttgcctttgaccacatctggggagctcctctggtcggtgtctttgtcactgaaggcctccgcagcagcgttgtctgctgaactgctgtccccaagtcgctcttcagtcagatctggaaggcaagacaacagctgggttaatcccttcctgctgtgctcagcttcgaactgcactaggcttctgggaagaggaagtttggctcgctgggtctttaaagaagaaatcaaaaaccatcaaatggggtgggcaagtggggtcggtcaaagatggcgcaatcagggttttcttggaatgctgcaggagaggaggctcgccttgaacacagaatggccacatatgccagcaaccacagaaggcttggagtacacagcattagcgacccatttagtggggctgtgaggatctgaacaaggcctcagaaccatgaaagaaggccacaggaggagctctagccatcatcagctggaatacaccaccacctaccccacagggcactttaacaatcacatctgcctcccacggggctggttttatgttatattatatacttatatataatataatataaatagggcttgtaattctgacagttcttcttttaaccgggttaccatgttgatactagttgatagagtttttcaccattttatatttgaattagaaacaagattgttttacatgacaatcccagttcccttctccctctcatcctcccctaacacgccccctacctatcacttaccctttcttctattcttcccctgactcaacctttctgctccctcatgacctctgcatccttcctcttcttccctttcattctcgtagctccctcccccctcttcccaagctctcaatttgctcaggcgatcttgtccctttccccttctccaggggaccatgtgtgtctctcttagggtcctccttgtttactagcatctctggcagtgtggattgtaggctggtaatcctttactctatgtctaaaatacacatatgagtgagtagataagttgatagagtttctaagccaaagaaaaatacaacccttgaaatcacttgaaaaaaaaaaaagaaagaaaggaaggaagaaagaaagaaagaaagctactgaagagccaggcaaactcagctgcctgggccttgcactcaaggccaaacaaagccagttctaattctggacggcaggacagatggagaggagaaagaaatggctggaaggtttcggagcagaagagggagccctgtctacccaccttgtgtggcaaggggtacctggatgcccatgtgtgagccagtgtgccagtaaagtcccgggaaaggacctatatgcaacattccaaattccatttgaagggggaaggatgacaaagaacttccttaacagagctaattctagcaagaggggttgttaagcgcagcctacagatttacaacagcaaacattatcctggcacacaaagccttctgttctggctgcatctatctcacaaccttttatgaaacagatcagttgccaatttgacattttaacaacctgaagacggcacccaggagagcaagctttgcagtgctaaataggcaaaagggagtgggtgacagtactttgggtttcatagtaaattctaacagaaactctaaattaaagaacatagttttttttattagcaaactacatacaaatagatttttagcctttaaagaaataataggctagctgtgggtgcttaatccagagtaactgatctgaaaaagaaaagagaagaaaccactcccagtaggcactagtcaggttgtaaactgtggctctgtgttttctcttccggcctgaatagtctcattgtaggcctctctgtgggcaaacctgattgtgtgcagatagccagaggtgaaatttcatcaaagaagcttctagaaggcacccctcctacttgttgttgtttactttaagagccttaaacaaagacccattgatagacatttttctaacaccacatgtatcttaaatgcaagaaaagccaatgaaagtccatggccaaatgtgtgttttaaaactttctgaaattataataaatcacataacttttaaccacatctaatacaaattcatacttatcccaatttactttcactacattgcttttattttcagtaaaaacctttaggtttctatagtgggattcatttgtagtccacacaataaattccaccccccaccccctactcccccaccctccgtcctgccccttgcttccaatggtgactctgggattcaccaaagacatagctttagaagagaaatttaacatcttctctcctgctgcttcccaggacaacaggcccagcttttatctaattattgagctacttgaattccatatccttgacacacaagacaaaaaccaaacaaacaaaagggctcatggagatttatattctaaccagcctgcatccatgtattcccctgactcatgaccccatacataactcagctatcgctctattcctaaacccttgagaaggagtggccagtgacagtgtgttaactttgaaataagcacaagattggattttgacccctggtcaatggtgctttggaaaacaagttcaatactttcccccatgtaatacagatatgatgtttaaagtgccatcctgctctgggctcctaaattcagcttatattatctatcattagcatcaagtatttactgacctgcaataggccaagagaaggaaacagaattaaaaagacagaaaatagcaagaagcataagcttatcaaacctattaccttggggaaagatgcatgtgctggagagagagcaaacatggccgggcatagtttgagaagcatcaaatacattattcgctggactcctaaagttggagcaaaccacatgttcaccaataatagatgaaggaataaataaaatgaaatattattccaactcaaaaaggaatgaaattctggtatctgctacattgaagaaccttaacaatagtctaaaataagaggccacaaaagaaatgatgtaatttcacttcctcaagatgcttaagatggctaaagtatagacacagtagaggtagttccaggggagtggagacagggggttactatttaatgagtatggagtttcagtcaagcgtaaggaaaaaaagttctggtaagagttttaaggcatcagggggggcgggtagaggaggacgggtgggagaagggaaatgagattgtcatgtaaaacaatcctgttcctaattcaaataaaaaaagttgaaaaaaaaagaaatcaaaaactcaaaaaaaagagttttaaggcatcataattgtctttagtaccaccaaggtgtgcacctaaaaacggtgaaatttgttatgtatattttatcaccaagcaagaaaaacatgacagagtatcacaacaatatgctgatggtaaagtttgtttctgtttgttgtttgttttgttctggagagaaatgggagcaaagggcacacctttgggagtaatctacacacctggaaaagcccacagttttgctgtcctcaacagaaacatggaaagctaaaagcagcttcgtgttttcacattttcaatttcatgaatttcacctgccctgaatgaactcaggaaaacagtttcatcagctcggtggttcactcttccacagtcacttcaggctccaggtaactgcaggtacagaaggtcagtgagggaaagctaggatggatgctcgggctactcaaacacacccacatcatgaaaacgtattttcctcaaggtggcaacagacaatccactagacactggagggcaagattctaaatcagacgagacacaattctacatttatgtctgttctcccgagttctgcaaaacacacttcatgtaatcttacttggctgcctgcttcttctgtaaccggaggctccaaccattctcccctctttgtgtttgctgtcctttgcccctctactgagacatgccagtgtactgtatactttggggtatttcttgaggagtggtggaagcctatgctgagtcatccacacccttagaattctgggctcatcagcctcccaatctcagtgtccaggctatgactaaatgtgaggaaagctgtcaggatatcatagggatccaatacatgaattaagggctttctaatcaactgagctcggccctgcttccagtgtcttcccaagggaggcacaagccagtgagagaagcaggctcacataccagagggaacacaaagtcttgtgagaggtaaatgtccactaacacctaggtttcgaaactctctgagttcaaggccagcctggtttacagagggagttccagaacagccagggctacacagagaaaccctgtctcgaaaaaacaacaacaacaacaaaccaaaacaaaacaaaaacaaacaaagctaaggttgacagacctcaaaaccccaagacaaactcctcacccaaaaataattcctgaaaagcagaatagacattgcgcccctgcaatttggggcactatgatgtctactattgtacctaaactaaaagcactgaaaactactataaacacagattttcacaagtcattatagagagtgacatttaagctcagcgataaaggataatttaataataggtgtttctttacatttccaggtttttccccctgaatgaactgtagagatcattcaagttggtctgaagcacaaaggcctttgtagacacagaaacatggaacttcagctgagaaaatgaaacaggaaatattcccaccaccctctgccttccactgtattaaaaccgagactctaatcagaacacaagtagtggaggcgtatttcaactgacagttttaactctgtatgtggcacaggaaggcaaaaccacctgtcaaaaagtagatgaaatcataacacgatttttctgtcatgacaggccagtcactacaagtgagggcatgctttttaaacatcgaaaaaaattttaaatattaccaaatattcaagctttcatttcatagcccatgaagcagaaatacattccacttggaaaagaaacttttcaattggtttatgagagattcaattagggaggacacgttttctttggaaaacaatgttgccaccctctaagcaaatatgccatatgatgacaactatactttctttttagctataaaatttaaggagaaaaaaaaaaaggagcacatttaaaatgtcttccggtctgaaaatgacaatttgaacaatctaactttctttgaatttcttcatataaaaacacaactttaaaaaaatcaaatatttcaaaaaaggctgccatatgtgtgaaacaaacattctgctcaaaatatggaaaattgttctgacttcactctcattggttttatacattctagccaattagtgcactaaacctaaatccacctaacatccagaatgaagcaaaagcgctggcaggattctcataactcagagatcactggactccgccctccccacaagggtgccatgcattgaaaatgtagattgtcgtatatcatctgttcctgtgatttgggggacacagacctctaggtggatccatagtgggtcactttcaaagggtaccaatctacacaggagccaggcagaggcttcctggggactcattaaaaactggatgagcagaaatttgaattaagtgggaataacaataaatcttgttctaaaaagttttcgagtgtgtgtgtgtacatgaaaacattcgtgctttgctttgtaaaaaaaaaaaaatcagcactgatttaacactgtataaaaaaaggcttcaagattatttccttaacctggcctggtagaacacacttgcaatcctagctagcactcaagaggctaagacaggaggatcctatgtctgagattctggaacgtgaagatcggggtggggcattgcttggaaagggatggtgggctcagggaagtatagtttgcaattgtaaacatcgtgtgcctgatctctttcttagaaggcagaaactttcaaaaagcagaggagaaatctacaaatctacctgtccacctgctatttacaaaatgtagccggtgacttgtttatccatctacttaacaaatccccttaagtcccttatacccctaggtacagggctaggaaagattatacacaggtgaccacaccattgcctcggccactggggcttccaggtaactaaccttttgcaaaaaccctaaagtgtgtctgatgagttggtggggttttatagtacaacacagcaagtcatgcagaggccaggagcagggcaggctgtggtatcttcacatagggggaatattataaacactcacacatggagacactgagctaagtaaagcaataatcggcggaaaacaatagaacattgatggcagcttgaaattcaagcctgactaggaactgtaatcaagagagtgaggagtccggaaacagttaatgttgtgggtttttcataatgtaccattatttggaggataagtttgctttttaaaaaattaaccaaaaaaacagaatagaaacaaactgtcacctagctctctttaatcctcctcctcagaaaaatagagcgtgttgtttaggcctggtgctgtgggtgggacagagtggtggtcctgtgatggccaaatgtcctcagagctacacaagattaagggactccaaggacctgagaggctaatggctaaagggggctgcaacaggttagaaggtgaaagaagaaagataggaagggaggaaggaaagaaggaaggcagagtagaggaagaaagcaggcaggcacatgggttttcactgggcactcctcctccctgtcaggaagaaatgcaacagttccaccagaaaaggttccaagtcctgcagggcctttgatttatgaagatttaccccccttccctctgtaaagctgttaacagaaagtgctgactggctgcagaaaaagaatttctcatcaatgctctttgattgtattttgcaaacaaaatgcctgttgcttggtaacatttcacttgagcctgaccttctccaaaagttattgctatcagattcgatttacactgtcctcctgtgattactgtaatcttttaaaccgggagttcatccatcagggaaaggaaaagttggttgtaagtggagagtactgccatcctccagatttataatcccagtctgcctggcacagactctggttcctgcagaagcaccctcatttttcctttaagtgtgtcctagtctccaccagacagacactagcattccaatgcccctcagggtaggccaaaccagaaggaagcagggaagggagctgaggcccaatgagaaggaagggctcaggagacttgtttgagtccttaggtgaggaaggagtgagctgtggcagtaagcagacaaccttcagatttgtcacagagaagccacatgcccatgctgccactcctgagttccctgccacttcatccagggacaaggccaccagagaggccagcttcctgtccttggccagtcattgcccccactttcctttacccccagagccagctctgaaggaaagtttctaagggacagtcatgctgtccccaaatttctttttatctggcttttcttaaggcccctgggttcaaatcaagccatcttaaagccagataagctttgcaatctgtagctgtatgacccaggtgactttaattgctcccagcttcttcctggctctgagtgcacagccagacaggatctccttatctggcttccatgaactctcccttaacacacatggctaagtatctctctgggaaattaaaaggaaaaaaaaaaaaaaagaaaaaaaaaaaagaaaaccaaggaagcagacctggtagtccaatcccactggagctggaagcccacagcaatcatcaaggtgcttcagcaggagacaaaatagagtcagtttcccaaaatcaacctctctccagctgccatgtttgcttttttcataataaaagacacctcaccttcctatcctactctcctcttaattcctaagcaaatgcctccctgtctttccccttcaagagcatttaaaagaactgattatatagatataatgaacataacatcattatataacacacacacacacacacacacacacacacacacacacacacaaaatatattgcagaaacacaacaaggagcattctacagccatagatctgtccttcccaggcaccacagcctatggccacccaggatcctcctctaaaggaaaagtttggggtgaggaagaagccagtcacaagggaccttgactgcagcttctcaccttggccatgacccttaaactccctcatatccagagcccagagcccagagcccagggtctggaaaggctggcttgtctggatgagactgctgaatcagaagcccagccagcctgggagattagtcttcccatgctattttcttgggggaggggatggaggtgatagaaagggagcaaaacaggtgagttccattgtatttatagagagggttaagttagaaacagggcctgcaatcaaaatctaattaattacaggtcagtcagaactggtagcagagattgacaggcagaaaaagactgcaatttaaaaagatatttcaatccatagccagaatagtcagaagaaccttcttaaattcacattaaaaagcagtgcccaaactaaggcaactgaaggagagattaaggaaagatttcttccagtcagaaaaccgagttttgccgttcacactactctccttgaactgtgtggggttttctctcatgatgccaagccaacatccttcttaaggcctgtgcttacagatccagaggaaaaatggaacttggtgtgccagtgcacccgtgctggtcttcaagaacaacctgtctctttgctaccctctgccctgcaaaaagtccaaacaggttctcaaactccagttcacaaaggagcagacctgaaccgtgtgtaagccgacagatgagactgcagctgggccctgactcaaagcccttccatcccaatcacggggatgcacatactctctacgtggcatggacaaacttatccaggaaggtctaatctacctctaaaaatgcatggcatgtcacacacaaatactctgcacaaaagtacgggaacacagcaacaggcggtcttagccaggagttttaatttgactgccccattttaatgttactttaattaattttagtgttggctcccgacagagttgctttttatatgtgttgcatagaaccagcccacttatttatttgtgtttgtagtggaaaattataatcagtttataaacctctcccaagctttttttcttaagggactgcaattgataaacgaaaacaaaagttagtgaatgttcaaggtacatagttgtggccagctgggaactgaacccttggtccctcacagcttagtctctggaagtcattcttctaccttttccccctcccaattaattgttctcaatttggaaggctccagctatccctgagtatttggtggaagcagagggagagaaaacaagccccaagtctggtttgtgcagttgaaattctttgcccccttttattctcctaaagcttgaaccccgctgttgcttcagcttggccccctagtgcctttgcccaattctttctcagcttgttttaggttttgtgactatacattttggagaccaatctgaggaggaccatacgatgctgaaggaacccctcttgaacaaagaccatggaactcaaggttcctgcactacaggaggcactggtgggcagatgggcattgcaaaatgcagaattgaattgtaactcatccttctgctctaccctggaagactctagtcctagagccagggaaactggaatggaaaattaaaagatagtagcatggagtcacttctagaactgaggtcaaactctcctacttgttctcacctgaaggaatccttctagactctccaaggcaaatccacaaataagaggcgatgagggggcggtgctacagagaaatgcttatattccccttatagttaaatatccacaaaacccggtcagcaacctgctttccgaacttcaggcctaaataccctaactgagccagaaggcgggactggcctaccatttcaccacacatcagggagtgtatatcttcagcagttgagctcagcactctggggctctagaaaacctttctgaagaagatctagctgtctttgaggagctgaggaagtggtagcagcagctctatcaacagaaaaactgtgggcctttcacttttaatttcagtacaccggttcagaggagatgggcttgttgcctttgtacgtttacccagtgaggggaaacaccagactcaagtccactgaattcccactgctgagaggggcacgcagagaagccagcggttcccttctgaggaaagtggggaagaggcttaaactgggggcagccagactcaggaaggagccagggtgacagaattaggtagaaactggggtctgcgtactttcagggctcagaccaccaccaccaccaccacgccccaaataaaagcatttctgagagtaaaagagaacagagggaagcaagaaggcccaaaaagctttcccttgtttcacagcaggccgagcctgcctaaacctggaaaagtacttgttaagttttccccaaggtaggccaagttttatttttaatttcttcaaatcacagcaacttggggaaaggaattaaaggaccaaagaggtaattcaacaaaaagagttagctggtctcgctttgacgacttcaggaaccttttatctacagtttctacagttcttaaaaggcgactttttttctttttctttttgttttttttgtttgtttgtttgtttttttaccgaattttaagtcaagtcttcaacccagctacaatgtccgagctcctttaagttaaagatgtcgcctttttgctcccgtgtcccgggccaagccaagattcacctagaaacagcaaagcacttgggccctaactgctaaccctcacctatttatccctacccctaaatgagagcccccctaaaacccgcctcatcatggtgcatttaaaagcggtccctccccagatttcgttttacaaatagtttgtagaattgacgttaagtttccccttcagcccagagaaggcaccaggagacagggacatacagcctggatatttggccggctcctgggttccacctgcatcgggttcagactctgtaagagactcacttttcccggagagtaagagtcagtgtctgctggggatgtaggcccaatcaggtcaacttcctacaaacgtgccctcgccttccaaacggatccccaagggcactcgaagtttcctccttcgaggctgaccccagcctagcagacgctctcacctggcttggcgagctgcgcgggcagcgttccgggctggggctccgcggtggtccagcgcagcgcggcagctgcagccaactcggcggcgggacgaggcggcgccggcggctgggacggctgggaggctggcgacgactgcgaggcggcggcagcggcgtcccccggcggcgggggccccggcagagcccgcagcgagtccgggatgaggctctccaggctctcgttggcctgttgccggcgaagggccacctgagccgccatcacccgctgccgctcgatgatcaggatgcatttctcgcaggtgcagtccttgaagcgacagtagcgcttgtggcccttgagccaggacagcaccccgtggttccggcagcgcgcgcacttaggcgtgcgctgcaggggcgcccgcggtggctgcgacaccgggccgcccatgtacaggtagggggagccgtagccgttcatgcccggggctccccccggccggcggcaggagcagggaggcagtagctggaccgcagagctgggaggcctgctcccgggggtctcggaagatcggcggcagccggaggtaccgcagcggtctccccggccccggaggcgctcgcagcctgaaccgcctggctggtggcacgcgggccgcgtctctgtctgctgcccctgagggcgcaagctccacccgctggtcctccttagcccagactctccagccgctgcaaggagccggtgagagctctgattaaggtctgagccagctcctctgctgttcccttcctctctggcaggagcccgcacctcctccgtcgccctcccccaccctgtccctcctccctcccatcgccacccccacccccggggtcccagcctccaaacactccccacacactctttcctcctccctagcacccctcgggttcctgcacctcaccttcttcgccacctgcagccaaccgggcctctctggcgggggcgctcacagcccccctcctccatgcccaccactaccctttcccgaggcgggagggactgagccgcagcggcacacccggcttgctggacgggggaggggttgggggggggatagcgggaggggtgggtacttgtaagcaggcaggcaggcctctccgctaccgactcaccgagctccaggcctggtctggaagcacggagtcctagacccacacttggcctcagcaattcggagcttgcaagggaattgagggtgcacggcaggtcggccccaggcggaccaggtttcaagtacccgacaagaggagtgagaggagtagtgatggttcggaaatttgggggactcttttcttcatttcgttttgcaatctggtttctctttcgttgctgcagaagaaaattaatttttaaaaaaatctgtcaagcttaaggaagacaactcgtttgattgggtaattttaatttcctaccacctcattctgtctttaaaataaacaaccacctctgccctaaaagacctctgccttggaaggcctggaagtgctctctcggatgtttcccttaaacatggtttaactttccgggagcggaggtagaagacacattagtggcccccaagttacccagcatgatctacttgttcccgcaacggtcactgaatcaacaaccaagctccggaattgcccagttcaaatccccacaggcactgtgatttattttcggataagggatggatcctactcattaaaaaaaaaaaaaaattctttgagagtgggaagaggctcgtgtataagatggccgcataaacctttttcttcttgatagcatcaactttgtttactattctttgcttgtttaaagtttgtctaataccggctaccactacattcgtacagagaaagctgccttctcccaccccaccaagaaaacaaccaaacaaaacacaaggtacatcgtagactcaggaccagttatcagctcggttggaagggaacgatggaagtcttggacgatgtgtgttagcggctcctgagtcctgcattaagctctgctctttgaggtgtggatgaaagttaacaggccggttgccgtgcctgaaccctggactgcacagaggccacagtcgtttgctggaggttccagggcccgaccctacaaccagccaaggaggagagcgcgtctggccttctgggcttgtgtgaattctagccataccgctgcgagttcaagcagcaagctctcggcctggaagagggatttggaaagaaaactttgaacgaggaatgtaaatatagttgcgtgccttttccgccccccaagtccttagccacccgggttggagaattggtgtttgttggtgactgacctgctggggctcggggagaaagtccttgcacacgaatgctaccgagagagactatccctaaagctgaatcggaccgatacccctatctcttgccctttcctaatctcgccctttccctcctgcgccaggaaaacaagttcctaacactacaacgggaaggaatttcgtaaactgtggggaccggagacagaggtcacccgtggatcgtagggcctcaaaagtggctgcctaccggagggagtcatgtctcatgaactgtgaaggacacgaacctgggaacgtgcactgtttcgctctgaatctgtgtctctcagaaacacaaggaccatggacttttctaaaagctgattttctcctaaatggtcagtgaaacggatgcggaaaatgagagtaactagtttctctaaggaaggaaagcaggggagctctgcaccaggttttggggggacattctcattctcaaggcaatcccctctccttcctgggtcacctagccaccctatcccagtgccactcacacattctggtattatttggtactgggcccgtttcactccagtgcacatcgagggctgagatctaaatactcatttgatatagcgcggtaatccttttctcatatttgatgggaatgttttccatatcccagtatttgacaacatctccctatagggacaggtttgtatttatgttggtaaaatgtcccctgcctcaaagtctattgtaacccaacacctgacaaccccgagtcccatttctgtttgcagaaagggtttattcaagcacataatgggatcccagcaaaaagcctttcagaacaaggggctatggtaaacttcaccacatgaactccgtttccagggctattaagcttttaattggaaaatagcagaggaaatttcaaggtgactataacgtgttagcagttagttcagagaaaaaagcccatgcgggaatgaatgtggaaagcatatggtccgaatcacatttaggaggagcggcctgcttctactaagaccctgcagcttatgcacttatgggaaaaatcatcaaagaaattggacggcgaggggaggattacaagcgaaagtaacctcactagactacacccactcccggctcctctgggtggtgtactagtgttttcaaaccacaattaactgtgtaagctatggcagatattaatacttaagtgggtgaaaaacacgacgacgatgcgcttactccttctagcgtacactcagtgactcggtgagtgactatctgaagctccgaaggtcactgttgaaggccggtgctcttgctgagaaagtgctggtgtctgattccaagtctgggggtcctgataggtgttgtccacaccccgcccagcaacattaatcaaaggacagttgcgtactgtgctggttgtgagacacacggagacatctgttctgtattctcacgctggggaaagccggagttcctattttgttggcgatgttactttggtgttgacagatgcgggtggggggtggggacttgtaaaaacccctgtacagacagaaaaaaaaaaaaaaaaaagtcacccctctgcctacgcaggaacctagcaggagctgttccgcccttgctaggtcagtgtctcttggcatctctctttagccagctttaagttaaaggaaatgggggtgattggggttttaaggaggaggtaatgcacttgattagcccccaactggttgggaagagcctcaagacttatggtatccccaagactctctggcgacctgaccggttaaggactactgactcgcatgcatccagtaggcctgagggatgccttgagcagtggagaaaggttctccaccgtctcagtgggggaaatagcgatgaaggagctggctgcctttggattaaaagacgcgctcagtaccaggatagagggggctggctgtgtgcaagtgctgcccagtccttcaggttctagaactttccagcggctctagcttggggacacactcctcacactcagcctggaccagactgcctggctccggcttttggggagagtagagtgtatctctcctgtgttagctcactccaagatttctaagggtcttctaaagaccggccacaccctcgctgagccgcccccctcttgcggagacagtcctgggcaggggagagggggcaagtcctcaaactgtttcggaagggagacaacccccttttgcttaagtgtgcgtctagggggcgaaccggatctgctgctaggctgctaggtaaaatgatcgacgtcgactttttaacagctcaaatacacagcctttctgtgcagttttaaaaaccaaagattgaaaaaaaaaaaaagaaaaagaaagaaacgagctaggtaatttgagtaacgttcagggaacaaagtaaacgtttcccttcccggggtcattagctcggagcgctaggtggacttctccgtgactttttttttttccagaaaactctcacccttccccctccccactcttgccttctagcagagaacacagctgcgaggaaagcctaggtggtgctgaaacttccccagtagggcgccagggccagcagccaatcagcaggaagaggcgcgctgccagcaccttggaagagtgggtgcgagctccactccttgagttcgaaattagaggacactagaactaccaggacctggggtacagcgccttacacaggaccacggtagacctacagctctcctccttcccccgctacagcgcagcctgaaggggcgacttccggcgagcgtccccgcccccgcacaccttggctcctcccaccaccttcgccccgccccctgaccgtggctagactccacccaggcgctggtgggtggaagtttgtgcttcttttccgagtgtgggcgggaaggaacttcccggtggctgagtgggagacgcctgtgtcccggacacgtttctctccaggccgtgtgcacgccctggactagcggcccttcacgtccaaaggccgcgtggggaagtggccgggcactgccgagtcagcagagcggaggcgctcgacttcccgcgtgggcaggcgtcttctagccgacctgcagaaccgcggtgtgggagacccacgctctgccggcgaggctggcccactggggccactctgcgttttaagtgcgttgctggggtggctgtaggccgggttccgtgcgcaatctacacgtagctcgtggtgtaggaacccagtggcgtctgcacggtggatcgcggtgaaatgatcgggcgggggtaccctgcgacccccagcctcagcgacagctccctcttaaccctcagtactagcccggatgtaggagcttgactggtctctccataggaaggtcagcctacctcagtttcccccgcggggtttgcagactagataaggcaaccactccccgggaacgaccccgcacccccacttgcacacatatgtttacactctctcccccaccacacacacacactacagaaccacaggacaaagtggctttgctgctagagtctgggcaatgcctcttgagtgcattggcaaaaaaatcccgcagcttgtggctgctagatttattctcaactggttctgccctgctctgaactggccgcctcctccttagcaatcaagaataactgcacaggtcgcctctatgctgctctaccgacaaggcccaagtcccttcctaaagcagatattccgcaaagacctgccagcctgtagcccggcgtggccagccgctgtcacccagctgctaccactggggtgtgtagccagtgtagtcctggatgctgctcgcactcgttttcgagcgagcaggtgtattatcaaggcattttcccgccggaccagcgctgacagtctctgggcgggggcgactgagagactcgatgaggggtcaggcccccagtctaatctctctacagaacctcaagacttaaagcccctcacaagctacgaagattgagaagggaggggaccccaacgatgggcaccgcctcgggccaacgccaggcctagcggggacagggaaagccagtaggacccgctccccttccccgcaccggcagtctccgatgtcgttgtcgccacagtagctacagctgcagaagggcagaggctgcagtagcagaggcctgacaagagtgataaaatgatcttccttaactaaactcgtaaagcactgggcaataaaactcaatcttctgtaaaatccaattaagtcattatctgactgattgtatctttaattgaaaacagaagtgacagtaaatttctgtgatatatcaggatcaatcgataccgctatacgattcagccccaagaagtgatttataatgtcaaacctatataggtaactccacattattctctctaaaaccactggtggatgaaattaagagtaagtgcatttaataaaaaacaagatggtcaggttattgattacaacagatgggggtgaaatcaaatagatgttttcaaagcacagagcgaaaaaaatacaagtaatttcttttttttcctgtttaatgcggctccccaaatatacacacaagaaaatgcagtcatcaataacgtttttatttcaggtacagctgcaaccacacaccacaattaatttttttagactagtttcatttcaggatggcttctgttacataaggaagtactccaaaagcaatttttaacaaaataatgaactcaaatttcagtggtaacttttaaagatgtacttattttcaactcagattacaacctaaggttacaaaatcatctagattgcatccacttttcccctgtagtaaagaaaatgtacatattaaactcattctaggaacaccacccaggaaatacctctccaggttacttcatgttgtattgcttttaagttaccctttactggggaaaatagtaacagttttctctcactgtatttcagttatgtttagatttggagtgtgtgatacagctatttccaacagcaacacagaaacagtgtcgttcccatttacttcctgcatatttcttaagtaattttgcctgctcttctctctggtcaagtacttggctaaatttatatttcttggttttgttaaaatcctgaaaactttgtaataatcgaaggcacttaagatttcattttaactccaaaagtagcaagcaattatgactaacttgggccaatagtcaattagttgtatgtgggggggagtgggtaaggggagagattcaactatagtttaaacttggtgagccaggcacttaattcttgcagttggtagtcaggaaccctacactgttacaagtgttttaatctaactctaaggaatatgaaccaaaacttctgaacggaaaaagacaaataacaaaccctgccgataacagaacaagccttctactaccctgtggacaccgagtcgaccgaccggcggctcactcgtcctcatcctcttccaggacctggttgacagtgtagctgctgggctcagaaggtgcagactcgcattccagaactcccttggtgctctcgttgctcatcggagagctgctggagagggaaaccaagccagaatcttgactgctgggcggtgagaacactaggggagagaaagtacgttaaaaacagtctttcttcagtattcaattaggttccaacaaaaactctgtgtttttatggcccctcagaacccctccttcacttccttaggataaaagtcgtcatatttacagcacatctgcttattaactgagaggaaagtgaggtagcagaatcccagacttatggttcactgagaagcaaccaccaacacaccatcctttggaagactttccacccctcccctttatgtaaaggatgctgaggaaactcctctcctagaaagatccacaccggaggagagatccctaagcaggactctgcctcgtacacttccacccaaggaaaaaggcaagatccagcaggtgatttgagcaacctgtcaactttcttgatatttctcttgactaccactgggcaataaagtggagaaggaggtagatagcttgcataactgtgaagaagtaaaaggtgataagcaaaagggattttttaatagaaaaagataaattgtatcacactaaaatatgagatttaaggaactagtctaccaacatgaaaattccactgggaaaatataaaggatacaaaaataataatgggcccaacatttttttttgaaacctgagaagccacagtagatacaaaatttaagcaaaagggtctctgaccttcttaaccttagcagagtttagatccacccccagaactagtgtgaatgtaattaaggggaagctgcctcggtaatttctctcctcattaacttcctgattggtttcggcctcaggattctgccgggcagtagtttgtcaccaattccaaatggccaatcgttaatactaatgtttgtgtaactaactgccagcatctgccacggcttcttgtacaacaataatggtgaaagggtacattagtgctcctgtgttaattcagcttgtgttcatcaatagggaaatctatgatgtaattagcaaaatgcactgggagttgagtgctgaagtcatttgtagagaactaaatcatagtggaagctgaactgggtcctgatgtgtttgccatcaatacttattaggtttggaatttaataaggtatattaccatgccaaaaagagacctttttacaagagaacactatttacacttgttatgggtttggaaatggatggcacacttcggtgccacacagaaataacagaaccaagatcagaaagtgggcctgtcaccaatctgcccaaccacattacaccccaaagctccaatgtgacatcgacatagacacttcagcatccaacaaggaaagagatcatctgaaaactcagtgtatagatttgagaagcaattttctgacaattcatttttgtattgaaggtacttgtttaattttctttaagagaaggtgtgagtttgtaaactaaaaaaatcattaaatagtattttataggtgtcaaagagtaagtgtgaacatatataaatacagcaaaaacagctcgcacatgcacacacacacacacacagacacacacacacagacgggggtccccaaaacccttacattattgcagtacacaatggcttcttactaaattccagtcgttccaggaacttcaaattctttgcaagtcatatgcatatgcccctcatcaaatacatctataaagagatgctgtccaaacactagacttttgctcagagatcatcttagcaggcagatctgaagaccacatattctcacaccaacaccaaaccagggagttttctgtctccaagccaagggggtgggggagggaatgtttattgagtatgcttcagaggccccttactgtagtgtttcaccttcaagccattcactaagagaattctgctccctgttttataagaggaccccaagtctctggcatgctcttgcccctataccagcttatttgggattatcacacctagaaactggctactcaccccctccccagtgaactgtcattggcacttggggagaatctgaaggaggtatcctggtcccttctcattcagacaatttagccctaagaaagggaagagtggggattttgcaagagaagaatttgggacggccccttgtgtctcagttgccctttatatctgtgaattgggaccacaaatatgccaccactgaggctgtaggtgcatggaactgagttccagggaggaggcaaagaatgaactcaatctgtctgggaaagcacctctattaagtttctccagtcccaacttaaagccatgttaatttcacatttgttcaagggctaggactacctttaaataagagattgttgtttccccagagaacctaggtaacaaagatgatcctaagagggacatacatggatcttcctaggaagggggaaaagacaagatctcctgagtaaattgggagcttgggtgaaggggggcaggggacgggtggaaggggaatgggggaaagtgtatagttcaaataaataaatagaaagaagacactgaatctagggaaaacatgtttctagcagaaagaaggtaatagtagtaagaatatatgtctcagagtagttattccaaaggagtttagcattgatcaattagtgttatttcatatactaatactgtggcttcactaagaaatatatggtagagtcagggttgttagtaaaagggctgggagaatagtaaatatttgtccctacattattcagtcagtcacatagtctagattctctgggaaaaaaagtaagaagttgttgaagttaatgtcacaatctgtttaactcattttggatagcacttcccaagtgcccacaaagacttgggtgttgttagtgacaaatgcacaaaatctatcttattagcatccttaaacattgtcctttggggtacccgtccatttaaacaaactttatttaacttttctggaggccatagtagcaactgtggtcataaatgatttggtatcaattagacaattcaaaaaactggacaggatcctttttgccttttaagttgaccctaatgggccctgcagagggcttagtttcaactcaaaaagcttgtctgtgtcatttggcaagcatgctgctaactcctggtgtcctccccaccgaagggacacaggcagcactgctaggaggagaaattggttcaatcattctgaacagcagtatagtgacatgtgataaggaaccgtaaaactgttcatcccctctgacctggtaattctactctggggaataacctaaagaaagagtaattggtccagagatgctcaacccacataatcttcactgataatgttatggtttcgctcttgtgcgtgtgggagagggcaactgcataggaaggggtggaaggggcaggaagcattagtagcaaacatcaattaagggttctccttccccatgagcactgggccttcccagaaacagaagaaatgaattaaagtgtagactgcagagggaaaaggaaaacctgcccttctcgactgtccttctgtcacagtcaggggtcctaagccaaggaggctggcccttgtgtgaaccagcaggtctgggacctgcttcctctcaagccaccaattaggcttacagcatctaagggctaaaaacaaacacatcttacacacatcagggctctcaccagcattgagaaaacagttgagatggtttcagtgatgctatctaaacaaagcgttctttctgagacacagtacatactgcaaaaaagctaagtaagaaaaaaacctaaaaaataataaacgcactcaaagccactctgtctttccacattgcaaagacccctgacttttaacttgaatgatctgttggaatgaaattgatggcctggaacgaataattctctgttggtgatgtgagaaaacacacgatattcatgcctgaagaaaaaaaaaaccgtttttcctctgtaggttaaacactagcaaagccttactaagaaacccttcgaaaataaaatgcaaatggccttccctggggctatgggctctttacctgtgtgcccctgccaaggggtactaaagtgcttgcctcttgctggtctgtaggcttaaaggaatctgatgaaaagctgtgaaaatgtcctcaacaacaaatccttctgcttcgagataaccatagtgtttggaaataaaatcgtgtccaatcaataccacttagcagatatttaatgtttcacaatagaaccctcttccagagtgggactgcggcccttctcactaacattgaaaataattaggattatctcagctgccggagcttggcaggatcagtttgtactttcaaacagcattaattcttggcactcagaacaagggatgaaaggtaaagatctgaatggagggctttcttccacctgatctatcaggattagctcattcttttccagttcatgcctgcgctccagttaagaggaaggctgagctgtaactgatgtaattagaaaccacaagctgagaaaaaaatagcccattattaatctccccatttactagaaatttacttaaaaaaaagtaataatctttgaaacaattaagcatgttttccccctaagtggaattaaaggctaacgacaagagctggaagggatgtattgggtaactcgttccttaaaactgtgtcttacttgtcaggtccaaaatctggagccagcttcagaaggggccagctctgccttaagtgtgttgacatgcagctgccccgccatggcaaaaggatgggtccagaacttgccgaacttcctcctcctcctcaagggattattccagccctttcaagcgctggggaacatgggtgaaaaatgaggggagctgacaccaggaaatacaagtctatggaacagtggccatatttctttccttgaacatccacacacaattcacaaagtgacagaatgttttaattctcaaaaacccacaagcctatcaaatgcccttctgctacaagccaggagagccctgttctgggagtctgcccatcttgctctgctgggactggcctgtttgctgctggaggccagggctaacacacctcccctgttgtcccatttagtgttaactgtcaccttgacagaatctaggatcacctggaaggcagacctctgggcacacctgtgagggattgtctgtgggagactattttaattacaataactgagatgggaagccccgcccactgagggcggctgcattccctagttgggatcatggagtgtctaagcaaaaagagcctcattcactgctttctgcttctggggacagatgctgatgtgacataacccagctgtcttaagctcctcctgctgtgacgcccccccaacatgatggacagtaatctgaaccgtgagccggaataaaccccttctctccaaatttgtttccgtcaaggtattttatcacagcaataagaaaagtaattcagacacctgatcactagagctagctgcgagatggttcagcaggtcaaggagcttcctgaccatgtgtggcaagccagaactcacatataggtggaaggagagaaccaaccctacaaagctgtcctttgaactccctgtgcacatcttggtaaacacacacacacacacacacacacacacacacacacacacacacacactacatgatttttaaaaagtattatttaaaggggggaaacggagacaggtgtctgagtgtttcacttcacctgggacccacaaaggaccacagcgtggcatcacctgcttgtgggtcaccatgattgaccttagtctcaaagcctttgagtaaacaaattgttcaacacgggcatctcggtcctcatgaaggctcaccatctctcactgtctgcccccacaccacgttggcactgggcactgaaccaggagctctgcctccagatgctgacacctcagtggccccttctgactcagtttccttaactagaaaaggattgcaagataggcaagcctcaaaatccaaaggtgtgcatgtgcagatccaaccatccttactgacaatgccggagtaaaaaaacatttgtctgtactgggagagaaaaaaaacaaacaacaaaaaagaaactgtacttttcttgtttgttttataacatctgtttaaacagtatttacagatttgagacagtttctctgtatagccctggctgtcctagagattgtcttgcctctgcctcctgagtattggggttaaaggtgtacaccaccactgccaggctcatattaaataacttaagtagtcaatattaattaagggtatatggagcattcatttctattatggacaagtaggacaccatttattttgttttgttttgttttgagacagggtttcactgtgtagctccagctgtcctggaactcaacttgtagaccaggctggcctctgggcagatctgcctgctgagattaaaggcatgtaccaccattgcctggttgactttattaatttttaaaattgtttgagacagcttcacataggtcatgctgaccttgctctggtgacccaagtgcacctggaactccaggagtacactactacacttggcctaggacaccattttatggaagggatctgaacacctgactttataactcacagccagaccctgagaacactgagatttctgtagctattcatctgacagtgctgctcagacagacaaggagacagatctcccataaactttaaggtctaaaagggtggtcatttactcctctctggaggcccaggagtgcagtcttctccacagcacttgggagtccatgtctaaggcagaaccaagacattaatagattcttattcagcagtggtttggaaagaaaaataagtctcagccacaccacagctcaaatatcccccaaacttctcaggcaagtctgcttcatgtgtaatgttcagagaaaggtggcattgatttccttcagctttcttcaacataacagaaagacctgagagttaccgtgaattccaaactgaaatctgagcctactatttgtgctttttgcagcattgtgtgttggacttcaattacatataacagtttctgaagctgggccaacctacaggaagacttaactgaagcagtcatggcagagagccacagcaacacctcatagcagaactagcagcttacaagaggagagacaaaccctggggtttctaaactaagactatccgagagaacagagcagtctaacaatggacgtacacataagggggacagtatgtgggcataacacaactacaaaacagggcaaagtcacacactggcaaaaagagcccgaagtctaacttaacaccagttttaagaattttaagtgcaagtatttatttttgtatttgcagtagcattaaagtctctatgcaaaaattttagagtaagcctcttaatgtgagtggcaggggtgagcacaccttaggaactctgccatacaaacaagagctcaagtccacttaaagatgccatggcagggatgaccacacatgtgcagttgtgtttgaaaacagacctatgactatcacagcaactatggtcaaccgaacaaaagagaagctccatgggccacttgcctaacatggtggtgcatttctttagcactcaggaggcatgagtcaaggccagcttcgttttcatggtaaatcctaagccagcccagggctagggagagcctgtctgggacacaatgtcttcaaggctcatccatgttagagcatgtgccccaacttcctttctattaaagggtgaggaatatcccactgcttagtgtgcagaaagttttgtttacacagtcatccaccaatggccatttgtgttgggtgtacagttgggctgttgtgaataagctgtaaacaggggtttacaaacagctcaaggctctggttgccattcttttgggcagaagtggaaatgatgggtcttacagtaatttacttaattttaaaagcattgccatacagttttacccacggtctgtgtcactggactcacatattccttgtatagaacatgggttccaccgcaccactttacagccacatgcctagtatacttctccattcacacctccactgccctggctcgcttctcctccctctgcccaccgattcctccattcccatatagtatcacttctgcttctgtgtcctgctgacacttgcgtgcagctaaggattgggtttccatcttctggtacccctctgcttttctccacttcttcccatctccccaacccagaccggactctctctcctgcctcttttctttatcccccaattcaattgaagagtcaccttcacctcacagtccctccccaaagcatgggaaactggaactgccaagtgcctaagcaaagtttcccagaacccattcatgatctgctgctcatccaaactccatctccttctccccatgcaggagaagggcatcatgtcctgtcccttgaccttaggccacaaggttatcgtgtctccacaagctcttccttcttctcccacccagccctgagcacagacctcctccacactgctggacttgccccttcttgtcacacatggctttagttctaagcattcccacaaacgtggcttcatgtcttgacttcccacagaaagctacatttgtttctgaatgatactgctaccctctcaacccaaatgggcttccagctagcatattcagcctaagagacccttccattttctccaacaaccacccagatccttgatgctctgttatctgcatgcccaggctctcacctggtattctatgctcaccctcctcccttccatacctaagtaactactgagtcctgccctcctgataaccacatgccccctcctcctcttggaattcttactccattggaattctggcccatgatacatcctcttcaagataaaggaagtctattgggaaaatagctactatagtcatcagactaggttttatatagattacttttcttatggattgactgcctaaagctgtaggcaattggaaaaatgagcttgatcaacagacacacccagcattgtgtccaatgatggagcaaacacatattcttcatatgcaaaatgattgtgtaaaatggcagtgtatcagcccacaaaataattccacacaagtgacaaacatgtttatctttccaaacctttcaatcttggagagtgaagtctctactcttactatcagaacatcttctaaaatggggaggaagttcaatttaaaaaaaaaaaaagatcaacaccacaaatataaattccactgcctctgtgtaattataaggctggcatttgatcacaatataatgaatttcccccttaatgctactgttgaaaagtatttaaatgcccaggcattgactgcaactcccacacaccttcctggtcccacattctgaggagagcaggtattttcacacttggttcatcttcagtgaagactataattaaatttgtaatttgaaaacaagaataaaaagtccagccttcagaccttgccccccaaagcaaaaggcggggaacaagcatgtaacagccacctcagctcctccaagatagagttctcttcattctgaaaagtaccggctcatctccaaagagacagacttacataaggaaatgctgcaagcttcctagcaatcagaaatgtcaaatggcacaaactgtcaggcctacatattggcatttgatgataccataattgctaaagcatttgaggctgttttctggccacatctgagatgctgaacacagagtgttccattagggggcagaatgctgggccacgcagagtgaacccagttcctgtttctaacctgcttccagaagaagctaaaactctccctaaaaatgtacaagctggtcacttaattcagagagtatttcctactctctgaattaagttctgtgcctagcactgctctgggtacaaaagaaatacctgtgaataaaatgtttcaactcataaggcaaagcctatgatcagatacacttggaatcaaaagccagcctggtgacttagtagagacatacccccagacaatcacagggcagctcttagaaactcctcatccctaaggaaaacaagagttaaatgtgatgcctgtttgctaaaaacatgaattccattaacagagatcctgaactcttgcttgttcccttaagaaggcagagcatcagaaagttttccccactcatgacccctgaaacagactcaggaacaagacaaagctaactatgatggcctgtttcagaacacctcgtgcctggtgttctgatctcagacatccccagtctcctggtcctctcccagtgtcttccctctgccaaattacagccccgcctccattcaggcagctctagaaactgttctgaagacttgacatggagctttttgatgaaaagcatccagctaaactaactcacccaaaacacaagcccaatgctgctcaatttcttgatgacaagttgcacagggagttctagacacgaagagatgtcaaaactctgcagcagggtaaatttttttttaaaatttgatttatttattgtgtatacattcttcctgcctgcacaccagaagagggcaccagatctcattatagatggttgtgagccaccgtgtgggtgctgggacttgaactcaggacctctggaagagcagccagtgagcctgtgagccatctctcagccccagggtaaacttctaaagtgtcctgggcatcacttaccacacagaacacacttatcagtgggcaaatctttacctttcatttttcctacataagggctgggttctgtttgagacaggtcctcactatgtagccttggctggtctggaactaacgatataaaccatgatggccccgaaatcacagcaatcctcctgcctctccctcctaagagctgagactgcaagtgtgcaccacgacacccagccatcagattgccatgatctactgacactctctagcagagtgagtttgtagccagtgctcagtctgtctgcatgctgggacagcatcagcttgctcatgtgacgagccccgagatcattccagctgacacatggcaatcagtttcccttcactctgccttccaggaaatgagttagttagatagatgcagcccttgtggccacaagtgggctagcatttaaaaagcagacatagagatagttttatttttctgcttacagggaactctcatgttgcccagtccattactgaggttttaaggttcaacttggtacttgttagagaaatgactattccattatttctgttatgaaacagttataacactgaaccagataaaattaagaaggaaaagacatagatattggtagtatctaactaatgcacttagaagttatgggggagggggagggagacgggattgacatgtgaagcaagcttgttcctaatttgaactaataaaaaaaattttaaaaaagccttaacaaaagaagttatggggggaattttttaatgttaaacttagttaatttaaaataatcatttctgaaggtaaagaggaaagctgattgcaaaagatttcagacaaagtaaacaggtaccgataaaaccaacatatatacttaaataaaataacttttaaaatagaaagtatttaagtaatgattttacataaatacaatctatttaaaaagtacccagtactttttatgccaaaacaaataacaaagaatagagtattcttattatttgtattttagtaattaaaaagcaatattcaaaaagatagctagcaaaggaacctgcaggcaccacgctcctggatccaagtgcctcactggaactgtgggagtgaaccacttctttaatgagcacagctggtgagctagcaccagggacttgacaccgagccttggaaaggctggactccagcaaggcaggagcagcaagtgctgacttaggtaagcaggcttgcagatgaggagcagcccacattatttattagcataattatccaacgtaatggctcctattgtgttctgggcattgtgctttaaatgtctctcatctttaccaaaaccttccctggaggtgctcattaatagcctcctctgacaggtttgaaacatcagactcagagaagatgacaaacatgcccaaggacacacctgctgagtgtcaggactccaacctggacagtctacaagaagccagtgaggcaggttggctggttttacccacacctgcctactcaggagtccagtcctttgcaatcagcactcctcttcttcagttcaaaaagtcaggggcctgagtacctgcccaagcagttacagcactgcagaaaaggcagctctgaggggagttgcacattattgtatgtttctcctccctctcccctccccccctctgtttttcaagacagggtttctctgtaaagctttagctgttcttggctgtcctggagtttgcgatgtagaccaggctggccttgaactcacagagacccacctgcctctgtctcccaagtgctgggattaaaggtgtgagccgccaccaccatccggctgagtgtttcccttctaaaaaatgaaaccagtagacagcaatcagggatcctaattcccagttctcatctgatccagcaaaagccattccagggatgtagccggaggaagggaaaacagggtcatgatcatgatccctgttgtaaatctcacagtggccattaatatggaagcaacttgatgtccacggacagagaagtagagaaggcatgctatacacatctgcatattactcagccttcaaaaagggactcttgctattagcagtagcacaggtgaagctgaagctcatgccaaccaaaataagccaggcacagaaagccaagcgttgccgatgccagactcgtagagcatccagaaaactctcactcacagaaacagagatatgcagacaggtttacaggcttccaagtttcattcatgcatgtgagtaaatcctgagatctgctatatggcacctacagttaccttccatgtcaaggagcaagaaatacagtaaacacaaataaaacaacagagggcagaggggtttgtccctaactgtggcaacggtctccaaacacaccaagtcgtttgctacatagatgcggtttctggtactaactgtgcatcagttggctgctttatgagagatttcgggggtccatcctgtgacaggtggcacgaagcacggagacaatgtgcagctggacagatcccagtgttggagaaaacgaactagaaattatagcaaagttaaccacttttttcagagtcatatctgaagtaaatagaattcagagtcctaaatggtagggcacagaggaagtgtggtgctatctgaccagggcagaaggggcattacccataggcaccagagaagccaatgacatccatgaaaatgccaacaatgaccatggagacagcaagcacctgatgccagaagcttcaatgaaactataaggtgtggggatttgagagtcacagaggtgacagcaacatgagttcaaggaaatgtattttccttggcagaagagaagggaacaaagggcaaaacaaacccccacctttctacaatgtagagagctgtgcctcctgttgtataattgtttccttccaagttgaaacattccatcctgcagggagctccctaagcaggaagggagattactcaaaatagcttcaggaagtccctgaaaaggaccagattcactaggcccctccctgacacggtaagcaataaaagctggcagtccctctcagacaagcccaagctgcaaagactgagaccagagcagcttcgtgggagaagcagaaaccagtgaagctgcctggaggaggttctggccagagtcacttagaaaagtcactctccaacctgttgagctacctgcagactgtgaagtgtgctccaggtttccctgcttttgtgagctgtcacccatgctggggtgggccttggtgatgcagctgtcttggagtcatttctgctcccgtaataataaccctgcacccatattcctgtatgtaactccaataaaactcactggctcagcaagtccaactctggtggtgtccctaactttggtttgtcatgggctccgtttcaggggtaagtagatgtgacagcattgtctccccatggaaagttttgtcacacaacagctcccttcaacagactcctactggatggaggaaagcgcacaggcagaatggagaggagtcagtcagaatgcaggggctgggtgggccctggcaggactatccccgtaggtcttgcacctcaccaagcacccaaagcacagagtggaagacaggcccggctgcacagaggtaggtaagtaattacccaactccacctcctgtgacctgccatgaagccagggtggagacaatgaaaaatgaaccaattcaccccagcaggcttcagcacccccggtcagcagtatcggctcctgatacatctaacagaaacgtttgctggctgccaggtccactgtggggaccgatctatcaatcaatgaagctaacacagtccaactcaggctgcaacttgaaaaacctgagtgaaaggaaatggttaacagcacagtaataagctcttggattccgactgtctctgagaatgatactgacccccttctttggggcctcagttttcagatctgtaaaggggaggtattgagctcagtgaccttatcttctctctcttctagaactgagatcccatcactatgctatgatttctcaggtctccatttctgctcagctctagtggcataagcacttgctcaaagtcagaattaatggagtatacaaaacaagagttgggtaatttagcatcaagtgattacttccgaagcaagaaattaagaccttcccattcctaacagacattaacatttcccgtcaataacagaccaagctcattccaatggctgggacactgctgctaaatgggatgaggctcaattcctccacctttgggctggagtagatgacttactaccagtgacacaatgagagcctctgctttcacaaccaggtgccaatcatgtaactgttcgattgaaatccaatcagtagcagcctgggctgtgaattttctaacatgagtggtttttcaggaccttgatgcttcagtctgaatccagtccctgcaaggacatcaatggctgctcttttgtgaggctcagtggttgtgcagtgtaaccttaacagacacagtaaaaactcccatcagcacggaaaggacgtatcttccatcttcctacaaaggacataccaaccatgtattttagacacagctattaccatatcacatcagcaagagatcagagtaattctcctttgtgtgtacgagtatgtgaggacacgcatgtgaaggccaggggacagcctctagtcatatttctctggcattgcccactgtaatttttttctaaagcaggtctgtatctctggcctgaagctcccacacaggctcagctggttggtcaatgagtctcagggatccacatgtctctgccttcccagtgctaggaatacaaacacagactatcaagttggctttcccgctggggttctggggcttgaactcatgtcctcagacttgcacagcaagcactgtagtgatgaagctatctccacagtgctcagagctggtgattttatgcagagatggatagggattcagtacaaggtggctgtcaggtagagagggactaagctggagggggcttggtttgtcacctgtgaccactcttatacttttctttcagggtgagcaggagcagtggtggagaaactggtccagttatccaacacctcagggtgcactgctgggtgagagccccctcaccacatctgtgactgatggtgatgaaaatcacagaatctacatttcacccagacaagaaggtagatgttgggaagcacacccttgctaggaacatgccactgccacaaatgcaagcgggtcttgaggttaacttagcagcattcaacccagtctgaaatgcaggcattctctgaatgtccccttttcacacctccacaggaaacactagcaaatctatacaaggacgagcttagcatttggttgcagtatcaaacaaacaaacaaacaaaaagaaacaagagggcagaggacatcaagcaataaacaatgattcatccaaactgaaccatttattggtaattaatattacagctgaaaagaaaaaaaaagagacatcctacttacactagcacgaagaatctctaagatcaactttggactagaaagaaaaaagtaaagaaacaacatgacctataacatgactttgtttaaaaaaaattccaaacttctgcagaaacaccagcctgtgtgcagcttcatagcataaagtcgggaagtctcaaatgggataaaccaagagctcagcgtcaataaagtggggagaaagagaacacaatgtattattacaccaagattatagctggtgaaaatgaagtggttttcttttgcaaggcaagaaaaaacagatctatgcattcagaaatatgttcctagcacacagcttccaagaattaatttcaaatttttaaattaatttatttatttacctgtgtgtgcctgcaccaaggtttgtgaaagaaagtcagaggacaacctgaacagtcagttcacactacatgcaatcaggcatcaaagttagactgtcatcaggctggtggcaagtgtctttacccgatgagcccttaccagcccaagaattactttattctcctttaaattttattttaaagtactttaaaaatgtttttaactagatattcattttattttatgtgcatttttatgcatgcatatatgtgtatcacatacttgtttcctgcttaaaggggtcagaagagagtatcagaacctcaagaaataggactatggttgactgtgaactaccatgtgggtgctggaaagtgaactccagtcctctgcaagaacaagggctcttaactgctgagccatctctctggctcctaaaaggccttttaaaaatgaattatgaaagctatgtagcaagttttccttgaagtgaaccagctgatgcaaactgttaaaggaaaagtcactagctagcacttatactgttaagatgaatcagcatgaatcttcaagatgagaaaaaaacgatactctttccagctcaaaacttgaagtgagtttgttttaatgcagcccctctttatacaacaaaggcctggacaatttattagtagttgccctttgggcatctgtgttttactcgacaatttcaatttgctaggctaccctgtgaccctactaagtggtcacaaaccctccaaggcaagtgacgggcaaccagaatcaaagtacaccacacaaatgtgcgctcagaatgccatgaaagaggaagggtacttcagacatgtcacctaggtccataagcacctgcaattatcacagagcacagaaacaggaggcgtaataaagcagaattaaaaggattgccaaaaccaaggatcagggtttgctccaagcataccaaagaggtggggacttataaaagggtaatttaaggttagaggcaccattctatcctcagaacatgtctgctacccaaggaccagaatatcagtaattccatcattaaacattcaattcttcagaatgaaatcagcctcctgttaaaatgtaaataatcaagaagactcaggcacaaaatcaatgttacttcaccatgttatttatcaaattgttttctctcagatgcagaagaggagtggggctgctagaagtcagaaaaagtaagtgagtgtgtgtgtgtgtgtgtgtgtgtgtgtgtgtgtgtgtgtatgagagagagggagacgttcacatgagagagacgttcatgagagagaggggggagggaaggtggagggagagagagagacgttcacatgcacacacctgtatacatgcaaatgtgtactgattgtgtgggactctggacagaaaaccgcaggaggctaacttcactaatcactcagtttctttcctggaaacagtcttgactggagcactttcaactgtaatcttttaatgaatttggcaggtcaagctcaagtctgcgtattctaggagaccatggattcttacaatcaatgaaagtaaccaaaatgagctgagcacctagagaagccctctgcatgcatgatttccttgacccacagagatgaaatgaagccatactatcagcttcaatctgtagccaggaaaaccagggctcggagagggcaagcaaccactcaaggccatgaaaccactgatagccaggtatgaggagactctaactcagtgctctcaatcaggatgcaaggctacctcccacaaacatgaagagagctggtcatgaatcagtgcttatgtccatgaggcattcacagtccccaagggggtcacaagtgcctttaaattcatctttccctcaagtagatagatttgatcaagaaaggtaaaggtaactccttttctcacggtgcccactctgtcttccttatcggaacaaatcctcctaaaataccgtgcttggtcatcacattggaatatgctggcagacctctccaatcagtccttgtcacctctaactgacggtcacagtggcaaaggaagtccagctgacagcagactgtataattcacatctcagtggcttcagagaattgtaaattcatgccacacaaaatcaagacgttagttgttaggccagcctgtctcatctgcacagaaaacaagtgcatagctgtctgtcaggtttgcattcaggcactcataatcatactcactagatgcctaaccttatccttgtgacatctccatgcaagtgtctgactgtgacagtgtcctgaatcaatggcagaccacaagtggcttatttcttgccttgcagcttcttttcttcaagcacacacagacacctcaaaggtgagaggtttatgacctcagcactaagacacaggagcccctggtcatcgaacagttctgccaccctcaggcaagagagtctgggaagatttttaaggactctgcagaagtctccacacccgaccgctgctacccttcaccttcaggctggcatgctttccttccccgtccccactctcggtcctgaggctcaccacccttcacatcaaacacattattagcttgcagatgtttgtctttggctctgtgtctagtgaaacccaggctaatgcacagatactctgtctccctgtctaagaagcaaacacaagaacaaatgaagtccaatgatgctatgaaatacaatgtgaccctaaatcattattgccaacttgacggatcacccaggaaagaaacctgagtgcttatgatggggtttagctcaggaggaaggctcatcatgaaaatggtaccatcacacagcctggggttcagatgccacccttctaaacaaggaaaagccaacaaagagccagcgctcatctctgttactgacttcggatgcgatgtgacgagccaccccacactcctcctgtcacatctctgccaccattatggactggagactcacactgtgatctaaaaatgaactttccatcctcagctattctgtcacagcaacaaggaagtaactaatacatatgactatgagcacaagaaaattaacttcagggaagaaaacaaagtaacacagaaaatgtatagttccataacgtagggtatattgtttccaagaatttatgagacctcagtggttaagatggctgcttttccagaggacccgggatctattcccagcacccatatggtggctcacatccatctgtaactccagctccaggggatccgagaccgtcttctggcctctgtgggcactgcacacatggtacacagacatcaatggcaaacacccagacacataaaatgaaagtaaatttttaaaaacctaagagatcattttctccctccttccctccctccctctctctttctctctcttgactgggttttgctgtgtagccctggctatcctggaactcaggctggcatcaaatccagaactccacctgcctctgtctcccgagtgctgggattaaagatgtgtaccaccactgtctgaccaggttatttctcttgggagaaagacaaagtactaaaactaaaatataaagaaactcatttttaaaagattgccacaaaggaaataggaaagttaagcaaaagattactctctagttccaaaaaggcccagcctggatggctttgtaggtaacaatattcaaacaaaagatgcagcccatgctctgtcacttgaaaatgctggagactggcttcaattttatcctaatagcctatcatttgtaagctgagactatataaaaatatgacaaggataccacaaatcagaatggaaaatcaagttcaaagtcccttgtggatataaagggtactaaataaatacaagcaaactgaacccagagatgcattaaaagagcaatacctcttgacaaggcacaatttgtcacaggattctaaaaatgattccgcattaggaaacacattggtgttattcagtacactgataagagaaaataatatcatcattttgatagtatagcactgttgtataacatcttcctccaagatcaaaaatattctatcctatgggaagctccttaatcaggaagatggacaactcccaatagcttcaggaagttccagaaactgactagattcactagactcctcccagacacaataaacaacaaaagctgagagtctctctcagacaaactgaagttgagctgcaaagatgacttgcacacaagtcatgctgaaaagaagactctgagaacagacccactgcctggaaaaggctcagccaactaagacatctggaaaggacaccctctaacctgttgagccgcctctaagctgtgcagtgtgccccaggttcccagctttgtaaggtgtgatgtgctttggcgatgtaactacatgtgagtaatttctgctcctctaagcaacccatcatccatatactataagcaaccccaacaaaactcaccaattcaccaaactggactttggtggtttctatactttggtttattgtgggttccctatctgtgtgtgttgcatttccccaggaaggttttgtcacacaacattacaatgtccacactttccccaatttctcaatgtgggaaaaatgctggaaaaagtttactatctttactgttttaagagccaggtgcccaaaccatttttactgtgccaccacctccttccagtttccggactcctccatctttccatcctgaaactacagtcaccgagggactctccactctctcttggccttggtctttggaggccattttacttttagtgtctgtggtctctgattaaggagcctatctaactacaatcgagcagtgcttgccttttgtgattagctttttctcttagcacaatgcgcttgaagttcatccatgttgtctcatgtatcagaatgtccttcctttaaggttgagtaaaagtcactatttatgtgtaactcatttgatttattacctcgttttcaggatgacacttgggtggtttcccactttcagattttaaaaaatttttcattttattttatgtatttgggtgttttgcctgcatgtgtgtctatgcaccatgtgcctgcagtgaccaaaaaggccagaagagggcatcagctctcctgggactgaagttacagaaattgagtcactatactggtgctaggaattaaacttgggttttctggaagaacagaggatatgctctgattgctcttaactgataagccatcttttcagccacttcagcttctgtaaacaatgctgctatggacatgaaagttacaagtataaaagcatcatctttaagttgttgcttttaatcccctttaggttgtgtgctggttggttggtttttgtcaacttgatacaaacctagacctgtttgggaagagggaatcttaactgagaaaatgcctctgtaagattggctggtaggcaagtctgcaggacagtgtgtggtgtgtatgtgtgtgtgtgtgtgtgtgtgtgtgtgtgtgagagagagagagagagagagagagaagagagagagagagagagagagagagaggacggaaggagggaggaatcgaggggagggcccaaatcattgtgggcagtgtcacccctgggcagatgcatcctatgatgtttaagaaagcaagctgatgtttccttgggaatgctgggtagggagttcatttacatttccctgttagcgatactgagtgtcttttcatgtgttcgccatacatttgcatgtctactttgggaaatacccattcaaatccttcacccatttttaaacttgtttgcttggttgtggagtgctggcagttatctctctgtacactctgtatattatcctatcagaattttactcactcacttttatggctgcataatagcctactttatggatatatagcctttttaaaaaaatcagttcgtctgccaagtggtggtgatgcatgcctttgatcccagcactcaggaggcagaggcaggcagattctgtgagtttgaggccagccaggtctacagagtgagttccaggatagccagggctacacagagaaaccctgtctcaaaacaagttctcttgacagcatgtgcactttccccaccttttgactgttgtggagtaatgtagctactttacatgttagtagatgcttgctcaggatgctgatcgcagttctttctgaatatatctttctggaatatatccagaaatggaattgtgctgttatatggaaagtccatttctaattttttgtggaactgtcagattgttatctgttgtggagggatgcttttgcacaaacttaagaatatcgttggtggcacatgcctttaataccagcactcgggaggcagaggcaggagaatctctgtgagttcgaggccagcttggtctccagagcgagtgccaggataggctccaaagctacacagagaaaccctgtctcaaaaaaccaaaacaaacaaacaaacaaacaaacaaaacaaaaacaaaaacaaaaaacagaaaacaaaaaaaccccaaaacaaaacaaaaagaatatcgttgactgttctatgtgaattttacagtgagcatcattgtgaacctcataaacacacaattataattaaacttatttctaaatattttactcttttcaatgccattataaatataattgtcttcttaattttcttttcaggttgtttattgctagattgtacacatacagctgatttttgtgtattgttttgtatcctgcaacctcacagaattcattaatgataaagtgtgtgtgtgtgtgtgtgtgtgtgtgtgtgtgtgtgtgtgtgtgtgtggtgtgtttatttagtatttttaaactagctgtggtagagccagctataatctcagcacataggagggagaggcaggcagatctctgagtttgaggccacaaagcaagttctaggacagctaggactacacagagaaactgtctggaaaaaagcaaacaaatcaaaacaaacataccccccccaaaaaaaacctcaaaaatgagtgaaaaggttgggctaaatttccttggttggtcttacagcttcctttgtccatgtgctgacagtagtttgtctgagtcacttggtttctttattggaagctcatgtggcctgagactgcctgggggaggggctttgtgttattctctgtacctcccatgtccatgtcctatacgtgactcttacagtcattttaaacaatgtctgtaccaactcgttgcaaggtaaaaatacaatgaataaatgctgttaagtttgatagtttatagtttctctcatggggctattacacctgttgtttcttctccttctactgtctatgttataatccctgttaatatctacaagaaagttcagtatgctggcctaacgatagacatggaaccaaattggagcacaatagagaacacagtaactcctactctggcatatacagtcaggtaaactttgacaagcgtgccaggaacctgcaaaggagactattaaggaagtggttctgagaaagcccaacacacacataaaaaatggttaggcttttatctaactctatataactctggatggatcagaaacagtgtgtagcacagttctagaaatcttagaaaaaactgtggggaaaagtttcacgacataggatttgacagtgacttcttgtatgtaacacaaaggtatgttaacataaaattgaatttcgtgaaaaagtttaaatctgcacatcaaaagatactctcgtgaggcagctctatgtcatggatgagccctgaaagcattttagatgaagtaaaccagtggtaaaagggtagattgtgcccagattccagccatatgagtttctagactcctgtaaatccacacagacagaatgtggagtaaagaggacagggagacagcatagtcacagagatcttgcctagcgtgcatgaggctctcagttcaattggaagcactgaaaaaaatgcagaacagagaatgtccagggactgataaaagtgcaaaatgaggagttagtgctttaaaggtaatttcctgtttgggattgctaccggagaaacttggggtctcttttggattcttcacctcactaacaaaagaattttaaaatgcattcaagacggtgatgaaaaaatcctgccaaaacatagtgtgatgattcaacattttgtacttaacatccagaaactgaacaggcataaatagttcaaatggccaattttctgtgtacttagcacatatgaaaaaaatcacttaaaaaaaaaaagctttttaggagctagggatctggctcagtggtagagtgcttgtctggtgtgcataaggtcttgggttcaaaagccagccagccagccagccagccagccaggcccacacacacacacagacacacacacacacacagacacacacacacacacacagacacacacacacacacacagagagacacacacacagagagacacacacacacagacacacacacacacacaaacacacacacacagacacacacacactagtgttgcattgaaagaagcaccaatacagcagagcaagccttaaaaatatcagcagaagacaatggctcagctcacagaaagaaagaggcacaaaagaaaagaaagccaccatcgagtctcctagaacattaaatgtgagctggctacttcagaccagagccagcacatctaactctgtcttatcatcaagaacaaaaatgcctggttaatcaaatgcagctatttcaagagttttctatttattttatatacatgagtgctctatatgaatgtatgcctttatgccaaaagagggcatcagatcccactagagatggctgtgagttgttgggaattgaactcgggacctctggaagagcagcctatgctctcaactgctgagccatctctctagccctcagagttttctaaaaacacaccaggcagcgcccaccctttccaaaggccgtgatttcagccaagcaatccaaatagaaacacatttccaaaacttggtttctctgccccaattctagtgccactcagaactacatagttcccttgttagagcccaggacattggtgaacacatagttaagtagtagttttcagacaggcttgaatctagacgtagtatgactacaactgtgtctctagtcttgaaaattactttgtgataacttcaggggaacaacttctccagctcactgtatggaattccctctctaacatcagcaaagtactattaacaggatttaaaaacaaatcatttgcctccattccctggagacaagctttgggtttggtaaacagaacaagtggcttatactcaaaagctcacttgaatgaatataacagtcctgatctactccactaggtctggagaaggtgtaatttattatggaccagttaatgctgtagcaactgcttttccaaaccggacattgattcatgaaaatgagcactcaggactctcggcagcgcaaaccctcacagcctcaggcaagtgctgatagaaatgtcgtacaaggcacggtgacagtggtatgcggaaggtgcaattagagcagtatttaacctaatctattgctcatcagaaaatgcttagcgtggaatcagacacggggctgacaagaagcacaagccgcttaactgtcccctctggcgatcactctctcagtcctgagtgtggcaaattaaaacaactacgcattgactctttgcttctgtaaacattaaagggtgattgacgacgacgacatcagcctgcaaccagactgcctttaatgccacccctcttggcttatctgttctatttcctcagcagcattcctgcgggacagggaggaaagcctgctctgccactgtagctcacctacaggggcggctcgataccttgcaccttgtggcttcagaggactcttaaaaatggggttttaaacatataactatctgccactttcaaacagaaaaatatgcttccaattagaaaatctgaaaaccagcattttactggtctgccacacatcctgaagggaaggagtcatctgtttcctttgcctcaaaactgtaaaggggggggggacaacacacgacaacctgggtagctgacaaggaccagcagacaaaaggaacagaccaccaagaagataacccagcaaggatggttctctgaaggccacaggaggaggacctggcatcttgctctaaagctggctactttcatcttttggtgcagagagggaaaggacagtcctgtccacaatgatgctgggaatgccggttatccacacagtaaagaatggaggtggacggttacctagataccgtaagccaatattaactcaaagtggatcaaatacctgctgtaaacagaagggccaagactagaaaacacttactgaaagaacagagaaagtttcctgctgctggattgtgcaattcccagtggtggcatcaaaagcacaggcaacaagcgggatcttatcagaaggcaaaaacctttctttcaaatcgagacacaaacaacaagagtgtagcagcaacccacagaacaggagaacacacgtcagtcatgtatcagattatgatgaatgccatttcccaaccttggctttaatggcagcaatccttgccaagtccccaaggctaatgtgctgccccaaggctacaaggcaagttttctaccatgggcgagcactcactcttggactgagatcaaccacattttgcagcacagaaaggtgtgcatttcggctcaggatgaaggatcagccagtgttgtcagcacccactcagtgcatgtcagtaacacccgctcagtctgacgggctatttgaataagggctgctgttcccacaaaagtgagactttttagacggtatttgttcaacgtatggtacttgtgttcacacctttgtctctgctttgaactcttgagttattctttctgtcaatatgaaagtcccaaagtgctatttaacgggacacttcatggtgatagaaaaagtctacatctcctcaataccatggcctcaagccaagtgcagctactgggtgaacagctgaaaggtggctggcatgacagaggaactggaccttcagagccctgtgtggctgggtagctactgtcttagatgcaacaggtcaaggaggacaagtgaaggcaggggtgtcagtgttggagtcccttgacagatgagcacccagagtccattgtactgctataaccaactacctgagatggaaactctctctctctctctctctctctctctctctctctctctctctctctctgctcatatttatggaggttgagaagacaaagatcatggtacagacatctggcaagggtctcatgccatgctatcctatggcagacagaggagcaattgcaccagactgtcagacaatggggacaggttccttcttccgtctgaagcccactccagagacaactaaccctctcccacagtaagagtcctaatccattcctgactggatttagaagtggcctaatcatgtcttaattctgttatagtggaatgaagtgccaacctgagttttctaggggagttcaagccacaacatgccccacacactaggttgtcccatgttctctcttcagcaatccactcacctgtaattgttactctacctgcctgtagtgtgacagaaacatatttgtacccagtttctgacacagacctgctaaaatcattgggatatcctgagaaagaactatggccagagtctttttcattctgataaggcgacgcttagtggactcccaccttcagggtagtgactcgctaccagaaagagcaaacccccattacaagcttggaactcagaggcttggagatgaaatgttgttcccactcccaccccactgccagaagccctcactgacgcaacactcctgggtagaatcctttttagaaagaccatagtagacagagcagcttccaagttctgtgagttgtctagaaaactgctgagcctaacatgagggtgtaggaacccccaaatttgtagtccaccagcgagaaacagctggagtctgaatggggcatgtttgggggctgagtccttaacctatggtgtctgggtgactagacagttaacttgtgcctgcattttactgtatcgtagaacataccactggtgtgagaggaaaatacctctcacaaccgtgagactgttgttaggattagataaaacgagctgtgctacatgctataaggtgggagagattacctcccatgtttggctctgaaactggcatcaggtagttcatgaacaccaatcctaaatttatttacttattattatataattataatatttatctgtactgtatattatttttattatattatttattctgtactggctcctaactcctagaagcaactcaccactttctcattcacattccgaggcctgagttcctaacgcacttgccaggaagactggcaaatgctggcacctgcggcagtacatcacagggaggctgtttagagcagaggatcagaatttctttcctgaattcagatatttaaaaatgaatccaaatcatagggatgggaactcagaaacgaggaaacaacctggaaaagataatgtgccggactgaagagtgacctttaaaagacccaggtcctgagaaaactcccttggtccaggggacctggctgcaggcaagggcctcatcaatgtgaggaagggcaaaacctacaggaggcagaaagagcagggcacagattccaccctgggacacattaaatcttagtgtctatttcccaagaaccttacccgcaggaagaggcatatggagacacacagccctccaacaatgctgtgaactgactgtgtcctttcctcccccaaggctgctgaggccctaccctctatggaactgagtggcaaaaaggacagtataagtctctgtaagaaaccaaacaaaaactacctctgtctgtctgtctgccccccccacacacaaacacaccaaggaaagagaccgtgccagaaaccaaccccaacatcaagttatcttggacttctggccaccaaaggggaaaaaagttctgagccaacagccatccatctgtggtatttagttatggcatcttgagcagaagacagaaacaatataacctggatcacctacagtccatacacaccacactcctgtttcacgtagccgaccctggtcattgcacacacttagctgttcggcaaaaggggcatctacaaactttcttgagataaagcacacctgtgactggaaaagctttctggtatagttgtgttgctgggtcctgcgacagttttcaatctcaaacttaatcaaggcccttcacagtttaggtgttacttgtccatatataaagggatgacgttttgataaatgctccattatagataaaccctaaaatcatgctaagcagtcagatgccaagtattctctatcaggttccatgcatataaaatgtccaggttaggaatttagcttaggaatagtgcatttgttaaacacaccaaagagccttgagtttcttccctagcaattcaggaaaaagaaaaaaagaagtccacaacaggcaaatgattatggacaggggtgggagggagagggaaatggagtgtggctgctaatggctgtggggactctttctggaatggtgggaatgttttcgaactagatagtggcgatggttgcacaactttgccaatatattaaaaaccactgaattgaacagcttaagagggtgaactttatggaatgtgaaatatatcccagtaaagctcttacaaacaaactaataaatcaagccccagccccctccatagccgcacaagtaacagaaacaaagcacacacggggaaggccacacatccggcacattgcacagtgtggctggtatcctggcttctctaggtaaagaaaacccatcctgagctcatggagaccaagcaggagaaggaccagagggcacagtttatactcagtcccacaccctaccaaggcaacactactgggcacacaacaggggaagagaaatgtccttaagactgtcagcattcagagaacactgtggccccttcggggtacatgctaggcacagacatgcagtcaatgctcactgaatttattttccttttcttgtttgtttgcttgttttttgagataaggtttctctgtgtagccctggctgtcctggaactgcctctgtagaccaggctagcctccagcagagatccacttgcccctgcctcctgggtgctgggattaaaggtatacagcactaccacccaacctgaatttattcttctaagcactgagataaggcagcattttctgaggattacggagagacactgaggaactggctcagcagggtgacttcaagacccgctgttatgaccagcaagatgcataagcataggctcccattttaactcccaacaggaatgacaaggtttcattgactgcttcatgtctgggtctaacctatgaaagatgtaggaagaaatgtgatttccttgaccctcctgtgccttcgattacctacgcaccagcagagacaatacagttatatgttcaaggatgaactaccatctggaaacttaaaagagaaacctctgaaatggcttcagctcagtaaggaaattggcccaagcagcatcagcgccacctcctggcctatccttacagggctagaactaacctgcactcaaaggtcatcttagtttgcctctctttcccagggtggttcagacaagagtgatcacagaaggcaccagtggccatagggaggaaatacaagcacgaggcggcaggttatgtttaaattttacagacaacaaataatttttgatccaataaaatatttagaaaatgattacaattaacaattttattgtttgaaattaaaactgggtgttcattttccatcaaaatccacgggaagtgattccacctgttggcccactcaccttggcaagaggtgacactggaggatttaaggccagtctctccctcccctggacactaagggctcgctcgctcctctaggtccccagaagccagcatcataggatgcagtgtttccctgaggcctcttcagaaagatgggcagtttagtcttgagcacgaagactttacaaatagaggaatcggtccccaaaggcagtgggcgtggccaggagctttgcttagctctctgtttaaagggtgtgcaggactaagtgggtacagaccacaaatcgttctaacggccccctgtgcaaaacagagaatttgaaaatatatgcgttaagcagatgatcaggggacttcaggggcagctgttatctctgaatattatttttatggagcccatttttaatattggcgcttttaaggtgaatgtaaataaacccgatcactcaataaattctgtctgtcttttatttcgcagatttaagctaaaacaacataaatctcttatttggaagcagcatctctcaagatagcagaggcagcactaggattttgatacccacttaaaaaatagtaataaataaggaagtgacttcagacttccccaggcacacataagacaagtgcggtgttcaacttaactggtggaatcagcccacaggatcttcttctggtcctcaggctaaaaggggacatcacagtggacagtaatcgtcccaagagaaaaggatccttgcttgtacttggaaaaatggtaaacacagtcattttacacaccgaaagatcaaactgagttcttcaatgaattgaccctagctcccccacaaagtttccatctatgccaagttcagtgaacagcagtttgaaaggtacataaaatccggtcaccattctttacatctgaaacccatttggaagctgacctcggcacatactgtctatcctgtgtatatgtgcaggatgagaagtatatgcctatatataaatataaatacatataaagctaactttcagtgttcagaaaacaaaagctatccccatctaacagccaaattctaacataactcaatttggacacctcatctggtgtgcactgcactcattcccagtgtaaaccccactgcgccgggcaatgatatactgtaatgtcacatcgcaatctggatttactataaagggccgctgacgggctgcagagcggtaaacattgcggtgaggtgtatttcacactgagctggtttttatgaagaacacttcaccgcccaggcacggcacccgggtgatgaatggtgagagatgcatgacaagcttcatcattgtttgtaaatcttaactgttcctgctcactaactctgcaggcaattttcaaagacagcagccgacagaaggacagcacagctctcctgaaggttattcaagttgtacttggcctggggccgtgcctccaaagagctgggcaaggaaaaatacactcctaagttactcctcactatgctggacgcaaagcaccgaggcccaacagatttgtcaagactggaggtcttagcagtgatcatcgggttgctctaactttcagtggctacagccacatgcaaggcccagacgaaggttagcacttcatggctttaaaaacaatagtcactgggtaagtgagcatacaggcaaacttggtgtgtgacgtggcctaaatggaaagcttccaggagaaacttggtgtagagagctatcccattcaagactactaagagcgttgaaaagatggtgtctttatataaaaataaatgatctggcagggccagtgagatggctcagtgggtgaaggcacttgctgagttctattttggggtccctcacaaagaaagtcccagaagtatcgtatcctctaacctctccccacacacagcgaatgcacacgcacacaaaaatacacatgcaaaacaaataaatataataaaactttttaattatctggaaaaactggattactcttgttcatgttagttaaaaataaagaaacaagtaatataccatataaaataataagctgacttagcttaggatgaaaggaaaaagtgactaaagtggtgttcctatctctaattgcttatagtttctaagataataactgggtacctgaccttctaatacctgcccctcatcagatatgaactgtacttgactctctcctgtcaaacaagaagaaaatcaaatacagccgtaaaactgagtggctttcccgcttgtaagattaccatctcagctgggacatttctgaatgaggcctgtgctacaggaccatgtttttgacatttcagcacaacagcaacagaagtactgttgtagccacatctaagcaacctcccatccacagccatcatctttctggaacatatttcacagacacgtcagaccatgtggccagggaggcttcagaaagactacctctgcctcagctcccaagcctgcatgtggataccagggcccctcagccaccttctccatgcctcattatcctcatctgtcacacgacggtgataatcctgcgtctgaatacgttacagcagtcagttgcacagggcactgtcttaaagacgctacagaagtgacacctgtgtgtaagagaaacacaagggcaggaagtgaagggaaggagagagaagagccagggaaagtggctccaagatgggaatgaaccccagccctactgttaaaacactacggacaaagcttggaggaagcatcctgccagcacccctccgtaagtgggaatactggtaaagcctcatctgggtctcttgcagggctacattcttcatcaaaagccagactcgtgtaaagaattgagtgtaaaactcagtttccccaaggcaagatccaatgtaatacaatccaggatgtatgcagctgagtggctgtactccgcacctacacggacctaacatttcaccgagcacgttaactctaacctggtgagataagaatagaaataacccaagagtggtcttcttgttcattcaagagaacacaaggcatcctggtaaccccgtcccccggcatgagaatacaccctggtcatccctgctcggtgctgagatgactgattctatgccttacatggagagtttgacctccccaagggagctccctgggaagcacctgccattactggatgatagcctggtggctggctgtgttaaatactggcattttacacatggtatatgctgggggccaccagctctcaaccttgtccagattgcctttgcagggtctgcatttcatggagaaagaaaagagacctgaataaaaacatctctgtttgtcacccagagcacatcaactaacctagaccattctctatattctttaggagctgctggttgtccacagcttcttcctctctgccgagtttccattcattggtaaataccaacatactttattcccaaatcaaaaatgactaccatttctaaatgcttaaaatgtggatagtctatcttccccattcagcagaccacgacgccaaactgattttgaaactcccaatatacaatacacatacactcagttccatcgggacccctgttgggctaaaactaagcctttctttatgaaaggaatactttatttacacagcccactgctcaacacctgccgacacagaaaggtataaaggcaaggtgatggcctttgaaccaacaggaatgtgacatggggagtcagtgtaggcaatagcgttccatgcttttacacagcactttacggatccactcggggaaaccgctgatattgcatgcagcttcccagctgagggaactggggctctaggataccgtccgagcactgcactgttgggccagagctgaggaccagaaccagccctctccacctcggggctggagcctctcccaagcaccagcttctgtgacatgtgccactgaatgctcaactcacctctcttcaaagcaagagctgacaataaaaggtcacataaggaaaatacggttatcagcccagcgctcttttctttgaaatgtggcaaaacaagctacatcctacagtgccaagtttaaattaagggcaacatcttctaaacactgcatgagactcagtcaccttttcttagggggtggggagggcaagagaccattggagtcttgagcccactttccacaggactaagccagactggcacatttctagaacattcttctccacgacaaagactgccagcacaaccagcactagtcttgaagggaggacgtggctgtgatgacgcctgccaccttttattgcgtttgcacgtactgacacggaattgcatcagaacctcacagtttcccaggcagcctctcagagcctccactttcaccttccacagcagaagggagtttcctcacactaggcactgtcaaaaccttacaacatgcatgtgacctcacagtgcccaccctcacccccttgtcttacggtttctataactgaagagacatcacaaccacggcaactcttataaaggaagacatttattggggtggctcacattttcagaggtttagtccaggatcattatggtgaggcatggtggcatgcaggcagacatggtgctggagaaggggctgagagtcctatatctagtgggtcacaggaagtgatctcagactctggactgtaattgagcatatataagacctcaaagcctgcctccacagtgacacacgtcttccaacaagaccacacttcctaatagtggcactccttttagaggccttccccccccaaaaaaaaccaccataccttctatagcagaacttctttacattggacagcataaaaacctcacaacagtcattgtgacctcacagcgcccaccctcaccttccacggcaaaactggagcttcatcacactggatgacatcaaaacctcacaacagccacctagccacatgacctcacagtgcccaccctcaccctccaaagcaggaaatgaaaccagcctttgagaaaggaggctacacacttctgattcatgggtccacgttaactaaccagactattctatcccccacacagccactcaccacagaaggtcactcacctcacactcaaggcacccatgacaaagaaatctgagggtgcttccaaatggcagcccagcctctgtgcttccacctgcagagtccgagaggtgctgccagaagacctttccacgaagcactacttcaccacacaactctaaactcgtcaaaggtgactgcacaaccattctgcctacagtctggcagcgcggaggaacggcatccatcgtccgtgaacgcacaggggtccaaggcaccatttctcctgactgtgctgagatcaccacagaagctgatccaaatcttctaagtgtgtttcactttcccagttgatccaaatctccctgcaggagttaatctgcctgctaagaacttttactgaagagggcaacatacggaaaaagtacctctttacagatgttacccgtgtggcggggcgcaggaaagaaaatgtcaacatgaatgctccacagtgtggttaaggttttcattgtagatacgagagcagagagacaaagcaacagactggccgtggccagggttagggaagtgagaaagaacactggagacagtgagatagcaagaaatggggggggggtatatgaacagtgagaatagctgggttataaggggttctgggggagggacgtccctaagctggagggagcttagggtagggtggtttggtgagaaaggctgggatgctagctcggactctgaaatgtattaacatgttcttgtgatactaagggagcctggaggcagcactgagcttgatatgctgacagaaatcacaagtagccatatgcccctctgccaggtgagggaaagggctccttctggcagacaggaaccagtttcacaagttcctgaggaatgctggcttttatctaactgccagaaatcctcctaaagtccttgtggagttcatttctggatatacacgctgactgcctttaagactgctagaaacctaacactacccacctattctacacctagagaaacagacacatggctgtggcacctccatgccatccattccggagtgggcatcgtttcctccatgttcccacagccacttcccaaacaccctgcatgtgtcgctatgaactggccacactttctcgcacaccagtcttcttgggcaaagcagtgatttccaaagcatatagagggaaggacctatgctttatttactttgagtttctaatctactttgattagatacttttatagtataataaagatgaattatgagagccataattgagaaaattggaaaacaaggcagtgttggtcagggcatggggaagtgggagccttcgtatacggatggggacataagacagctcagctgctgggagaacaggttaatgcgcctcaaaaaattaaaaataaaactcccacaagacctagcaattcctctctggatgttctggacagacctacactaaaaggcctcgtctccaggatgacactatttaggaggtggcagaacctggatgggttcgcaggacctcatgacacaggtctgtaattctaaggaggcaaaaagacgggcatgttccaagcctggctggactactgagtgagttcgaggccagcctaggctacatatcaaaaccctgtagcaaaaaggataaaagagggatgggatgcatctcagtggtacagtgcttaccacctagcatgcgcctgaccttaaattcagttcccggtgggaggcgcttgcatcactgaaatacatacccttgaagaaggtgcaggaccctagcctcttcctgttccattttgtcacccggataacaaggccaatggttttattccactgtgtacctttgtcctgtgacgccccaccagaaacccaaggcaatgggccactcagtgatagatggagacctccacagctaacctttactctttgaaaacgacttaattcatttttttttatcataatgacaaatgctgactaatgcatacttctaggcgtaagttcagaactaagaacagacaatcgaataggcatgtatgagtgtcatgccagcactatcaactcatgggagtcaaagaatggcaataagccaaatgtccatcaaaggatgaatgaacaaaatacgatacattcgaaccacagaatattattcagatatgaaaatgaacaaagtgctaatttatgctaaagtgtgaatgaaccatgaaactatgaggttaagagaaagaaattaacacaaaggaccttgtgtcacctattccattggcaggaaacattgagaatagggaaatctggaggcagagaaccgattaccagggaagagtggacataattccttcatggatatgactctcttcttcagtgggtaaacatgactcagaaccagacagaactgtgacatacacaacgccccaagggtacagtttcagatgtctcatgattatcttatgtgaggtgcaagtgaattactataacaatgaaagataaaaactacaagctccatttttgttttttttcatcaagctcactagacaactagttgctctatcaagtctctcctaattcttgattcctttaaatatcactcttcttcaaccagtagggaagggatctgcagacccaccagagctgtcactctggaggccactggcctggctccctgggtcctgctggaatggttaatcttagctggatctggaagcaactaagagatacacctctaggtgggtctgcacgggtattttccaggactgagaccctccccagagataaggaagtcccagagaaaagctgttgctttttgcctgcctgccttcacctcttgctaccgagtgcatctatcctacagctgccattgccactgctgcccctgccctttgctaacacggaaacacattccctttggacttccagcgtggactgaacaccagtggctggctctccagggatccttcagagcacagcaccagactaggtgcagccttgtagaccaagcagcaactggctcccaagctctctgagcaagaagaaggctcctgctcacaaccagagcagcaaggtcatccatcatttttccctgggaacagcaaatgggcaatccaagctttcttgtccaatggcctgtcagacactgcttggcttggttcacggaagcactttcttcactcgacttctgaaacaccacccacttgcagttttcatccacgtcactgcttcttgtctccttcactggtcatcctatctaccagtgctcaaaacacagaggtccccaggccccggcctcagccctttgtgtctcctctgcattcctgtatattcacttttctccaggtgatctcgtgagactgacttacacagtctgtgtactgaactttcaaatttttatttctatgagaggtgtcccccacaactcagacttcacacattcaatgtctgttcagaacccacatgcacgtatcacagactgctcaaatctggtctcaaattaatctcccagaggctgagaacgtacctcagtggtacagcacttgcctagtatgtgggatcctgggtttaatgccgagaacctaacctcacagagaaaaataatcaagcatgggtggtacacatatgtaacctcagtttccacctttgtacacattccaaccatcacttcaggatggagaagggtgatggggcaagttcttctgtgtatgtttatcttattggttgttgaataaatactgttggccaatgaagaagcaagttaggcgggactaggagtcaaggaggattctgggaaacgtaataaaagtcttgttgtacaggcaagaagtgacatcgcagacagactcatataagcaaggacaaacaggaagtcgctctcttgctctttctcttccttttcctcctgctctcttctctacggagcgacatgtgatcccaggaagaggacgccaacagaaggggcacgcaataagtcttataaaatatatagatttataagtcttataaaatatatagatttaggataattaagactgagctagcatataagaaattctagtcaattggccagtagcattgtaaactactgtaagactgtgtgtgttattctgggcacccacgtggcagcagggctcgggcaggtggagtaaagatttattgttacagaggggtctgctcagacgttttccacaaagaacaacaaggtgacagggaggaacctctcacacttttttcacgacattgtttcttatgctgccattcattgcaaatccagagaacaacatcaagctcacacctatttctttagatactaaggtgagctgggcaaaatggcacatacctgtcattctagctactctcgtggcagaaggctcacaaatttgaagctaccctgatttacacagtgagtttaagtccagcctgagcaactatctcaaagtaaaacccttttgaaaggcctagggctgtagctcagtggtacagcacttaccaggcatccatgggttcgagtgcctagcttgggcaaagagagtcaataagttacatttatccatttaaaaaattgaaaaaatatattaatgggcaaatttatactcaagtaaaaatttaaaaaccactaagcctacttacaatactgttctgcaaatcacttagaagaccatttggaatatttgataaacatgtagaaatcgtaacttatttatttaaccaatcaaccaaaggaactcaactcaatcatgactgtagtgctaggcagaactagtgaccagccaaccactaccagtgtctcagtgactaaaatgatgtccccacccccaagcacccatcctgccactgtctcaaaccctcagacccattatccaaaagtgcctagcctgttccaaaacactaaagctggggactccatatgacaaaagacgacctgtgggcatcctagttccccaatgattttcctaaccttcctcatctgctttgttaaaaacctcatgtgtggcactccagacatctagctggacatcagaaagccacattccttccaccaattagccaggttttggatgttctactaacacattttttttcttttttccataattccataatttatctgtggttcttcaagtccagctccctctttcccacagcttgagccaattctgactaattataagggaaggagagggttccaggaaatgaggccagaggcctcaggaaaagtaagcaattcctgatgccttatgctatggtcacagtgctaccaaccccgtttctatggacatttatctctttccttctaagtgacaagcctcctccaccataagttcagacatctagtgttcctcctcaaatccattcctctccactccttacagttttttgttttgtcttactgccttctctgaatcgatgacacctttatctcaagaaggccaagcttctaaagctattctgttattgttagagtaagaatcttaggtgatttcctccttacacggaacttgtttctaattttctatatgaaaataagtctctttaacagtttcatctccaaactgtacactggctatgtctgacagcagagttgggatcctgaccgatggggcaagctcacttaaaacaggcagaatccttcattccttcactcactcacttactcaaccacaaagagcaaagagaggctgtcagagcagactgaaaaggaatgtgagacgtgtgttcttcttaaggagcacactggccaggttatatgtagatcccaaaggcagcgcctcggagaatatggatatttatgaaacagagaggtcacagtctactctaaacatggcgatccagtattaacaaagatgaaagtgcagccctcactgtgcatttcagtctctccacgtcaaaccacctcgtttctatgacctaaatgtcctgtatccacggaagctattattgtactttaggagagtaaataaagcagcatttgtcccgactttttgtttgtttttgctgttgttgacaagggcacttgcccagcttttaaagatttaattccatatgtgaaaaccaggtcacagttctgattctcattttcttaagcataagctttgcaaacaaacttttggcctgtacgaaggtgctctacccctgcctacctgaggctgctgagccgaactcagtccctggggtcgatgaagaggtcaaaaaagacaaccaactccacaaagtcctctctctgaccttcacacccacattgaggccctctcccttccttgtgcaacaaacatataataaataaaataaagaaaactcttcctctatagtcatgttatttaggaaattaatgtctccttccatttagtataaggtaatctcgaatgccctgatcaatctcttccatgtcactcaggactgcctcgattgccacttccgggctccactgtttgcttacagctttcctaaaccaaaagatgctgaacttaaaaccgggctctggaaatgcagccaggaaagacctgcccatcaactcagaataactgttggggagaaggttaaaactgaacttgaggaattgcgtatttcaaaaggcttcggttcattaaacagtcgttttttatttcagccatattagaattatttgcattgctactgcagaagcccagatctactgtattaaaaaaatgttttactgtgttattttatttccccccaaaaagatgaatgcactttgacttttaaagcaaagttgtaaaacaactttcatatacagaacttcacttcataaaaaaaaacaaaaacaaaaacaaaaacaaaaacaaaaaacatgtggacttgaaacacacttaaagtgtccctgagcactgggttatcttccctgggcccttgctcagcatcagcaacgatcccaggggtttgatccctagcaatggggaaaaaatgagccttgtatgtcacacttttcctcaaaaacacagcatttggagactggagagatggttcatcagttaagaacactgcctgctcttccagaggacccagcttggacttccagaatctgcatgttagttgaaaaccatccacaactccagttccaagggatccaatgccgtcttattgccttcaggcatcaggcacacatgtggcacacacatgtacatgcaggcaaaacacacgtgaatttttcttaattaaaaaagataaaagaaaataacatttgtagggacagaagtctatctactgtcacacatgtattcagaagggaaggaaactgcattaagaataaaccaactcaaaagaggcttttcatatctggtattgggatttttgtttggtggttcttggctcttgaggagtgccatcagttcagatgagaaaagttcattaaagctacatatgtctatgcattcactgaattacattttttaaaggtaatagcttgtagtatgattccatgtagtttttcagtcatccatgttgttattttacctccttcccgcccttcatcttcagcaatgattgctccatttccccagtacaaatacataaattcatgcagtacaactgataaaaaagaagccatgaatttgaaggacagcagaaagaagcatggggggggattggagagaagaaggggaagggagaaatgttataattaaaatacaatctgaaaaataaacaaaaaagacacgcctttaatcccagcactcgggaggcagagacagtcggatctctgtgagttcaagaccagcctggtctacaagagctagttccaggacagcctccaaagccacagggaaaccctgtctcgaaaaaccaaaaaataacagaggaggaggaggaaaggaaggaaagaaggaaggaaggaaggaaggggaaaatgaatctataaaaaagaataaagtaaaaccaatttgcagttaaattcttcacagaatgttcatctggtgaaaagcaatcaccaatctcatctggctatagaccctgggaactacattaatgacctgcctggtaaggtagctccaactagtggaatagtggtacaagtgttaaaggagtaaccaatcactttctgcttatatttagggcccataccacaaaacaggacccattctcaacactgtcaactagaccaagaacttatggctaaattatgggctctagaggaaaacctaacattactctattaaatggacacataattaaaacaactcttaacgacttattgttacactgtaaatcaatgcatctctcaacctttatcagagaagcttctttttgtggtagatggtgattactagaggcctacaacagagattttagagtgctcaaccctaaaggggatgtttatatcacaccccttctcctcaaggctcggggtctatgtgggagagctgaagagccagaagtggagagtgactcgaggaagcacactttccagacataacggggcaattatgcatatgaacgcacagcaattgtgacagcatgcacaacacctgtgctagctcaagccatcaaaatgccagcatgggggagaggggtggatacaaagccccacccctagctaagaagctattggtattggttgctgcttggagaaggaaagtcagatttctttacagatatgacatctggtttatcaaccacactccagggcaggtcataacacaaattgggtttcatggtggaggatggggagagggagaaggagaggaaggaagaagttgggtggagaaggtgggagatctgggagcagctgtatgatattctcagagcattaataataataatttaaaaaccctccagagctcctatgagcgatgcccacagaaacctactcccctgctaggtatcatctcaatcccagctatccaccacagaacctaccgcttgctttggcttctgagtaggaggggccgtcctcaaaggtgaagatctgggacatgctctggcccaggtaggagggaggcccgtagtacgagtgcatcctgtactgggagctcaccgggtggcggctctctgcgctcttcatctgcttaagaaaaatcaaagaacaactttgtatggtttgaatatgaagtgtttcccacaggatcacatgcccaaggcctggtccccatctcatgacactaactttagaaaatctgggaatactaggagatgcgacctaactggaggcagtaggctactggagggggggcagactttagaggacagtttgtcttttacccctccagtgtctgtctgtcttttcttcctgggccacacaagatgagctgcttttgctctccatacctcaatacctccatacctcaatttcggcatatcacagaaactctgcaccttatatatcgaggtagggtcttgcacttaaacccagagttcaccaattcagctactccaactggccagcttgctccagggacctgatctccacctcttgacaactgcaagtgggtgcctaggcctgccccgtatttatacagatgctgggcatctgaacgctgagcctcacgcttgcatggcaagcactttacccactgagccgtattttcagtctgtctaagattgaaatggggttgttgtggattccgtaagtgcttcagcagaactccagcacccttcaaactaatgctgcaggcttcccaagagccagttacacagtctgaaaaatgagcactggcgtaacagtcaggggccaactttaagcacagatgcccatgtgaataatgggttccccgctctgggggctgagttagtcacctctccctcgggtttgaccacatctacaagtcagttcttcaaggaaaatagttcttggtatctcctgtgcacaaagcaataggacttgagcccacaagccctgaaaaatgctgcatttttccttttgctatggaaatacatacagatactgaaatagttaatattcaccatgacttcagagcaatagtcagcaagcattttactataaatggccagatagtaactaatggagggtttaccatggtgtctctaggcaacagcaaatgaatgggcatggctgtgtcccaataaatctttatttataaacatgtggatgagttgtcaatcttaattctcactgcaataaaggaagaagctgatgccttgcttccacctcttgaaaatgtaattcaactggtctggcacgtggcctggaccctgggtctttccaaagctccctaggtaattctaacatgccatcaagactctaaaattaccaatatgtatcatacaccagagaagaacaagatctcgtgtattttaaaaagtccaaaaggtcaagtctgacaagaagattggccaacagctgccatcacagcatgcacactgcccagaaagctatgccaacaaatggtattctttcaaacagctcactggaaaataagcactgtttcaaaacatacatgtgcttattgcccccatttaattatttatctttccagaaagcatcaaaagctgtgattacctagaacttggaattgagttatttgtttcaattactgtttccccagtgactccctgagacaacagaagacttccagcaaaagaaggggggggttacaaaaggccaaactccatttgaggttattaaaatgttagtttactgaggtcatcaatcacctcagctacatccaaatcgaagaataatgtgatttggggctggggtggtagctcaaccatcaggggctaaactcagaaaacggaggaccactacagtaaccatctactggcaaacctgcacaagaggaagaatacagagcattcttaaacacgaagttaaaactgagttgatgttcaccccagaaagcctgggagtaagtccaggtcacttcctgtccccttctaatttgagataaacaagatagacagctgatgatacacagacaacacagtcctgccactctggccttagacaagataataaagcctttgaaatttatttgatcgtaaagcagcagttttcatttggggacaagcttgtccttatggagagattgatatatggaaacttgttcagttgtcatacctgaaagcaaagagagttgctactggcatcgaaaggtcagcaacctgctgtactctcacagggcccacagcagttcccctgacaaccaagcacccaccccaacaccacaactatgccaaggttgggagacctctttcaaactaatctgataccctgaaggccctgtcctcacttttcggtgaaagacaaaccatagtggcaaatggaggaactgttccagtctgtctgtctgtccgtctgtctgtctctctctctctcctctgttattcaatactaacttgtttctttgaaaatttttttttttcgagacagggttcctctgtgtagctttggagcctatcctgtcgctctggagaccaggctggcctctaactcagagatccgcctgtctctgcctcccgagtgctgggattaaaggcgtgcgccaccaacgaccggcttgaaatttttttgttcctttatattaaacaaataaacaaatgaggcaaaacctaaaaaatccgagattccagtgaattatgtctgctattattattagcatgtggtggctggcaagcaagagacatgttttataatcttattatccaccccagtctctgaactgcagtgtgacccacacaggcagcaaatgcacgcgctgttagcattcaatccagatgaaaccttgaagcttggggttttgttttactgaactgttgagaaaatgcatggcaataaatctgagtcacggccccctttcctgcaccctaacccaccctgtctctggcaacagtaacatcccagggcagctcaagagtgcccgacctcatggcctcctttctaaaagttcttgaatcctatctgcctcctgtctagtgaggcttcaggtagaagtgcctgatcttagagaaagctgaccttcctcgggggaaaggctcaagaggcacactttgactgtttgtaagttagctcacaggtaagttaaagagaacagtgttcccagaatcctccacaggacaacacaactaactgcaggaattaccagaccctgatactcacttggattactatctttcaagctctgtctggggtgaacctttagttttctgatcagaaacactcttcacagactggaacctcaggtctccagggcacacagagtaaaggctgggattaccatctgccatccttaaaacgatttcattggtttgcgatgcccattcccaggttcacctagccatccacttgagccagggaagacctcatctgggcagggctcttcatcagagccccgttcacccaccaagacatacacttgctcatctcccacactgcgagctgccctttgtgaagacttctttttagtgtacaggctaagtgcctgctattacacacacatctcagagaaaacaggccagagatcaaatgccaagtcctgtgatggtggcacattccccttggctgtgacccaaggcttcctgctgcctgtctccatctagtctccagagcctctgagcttgtaaccctcctcactctggggagaggaggagggaaggggaggggaagggaggggaggggaggtctttggcagaactcaggtgcctgtgagggaactcaggatctttcagaacaggatgggggaggatgcccaccatgaggactgccctcaagatactgaagaacgcaaaagctgtttgtctttgtccagacacagaaaagatgctcttcctctcctgggggtgggggaaggggaaggggaagagaccagcagaaagcaaacaatttaagaaccaatacatctaagccatcttagactataaagcccaagcttaccaaagcaatagcaacagaaagaaacatgctaaaacaagaaaactcatgtagatggggcttttccagcagaagaaaggagtttatctcagtaaattcaagaaatgagaaaaacagccatagtatgcaccagggcaaagtaagcaggtcatgtggaaacacagacccaaagctgacggtggaagcactctgcaagccttcccccaggtctccaaagcctggagcacatggacactgattcatcagccctgagtagctggtagaaaccctcttcttccaccacatatgggacttaggatcatatgtggacctgggtggtctacggtgtttgccttcaccataaaagcaattaatctgtggatattgctaacttaaaaacccaaatgcacactttcagccatgttgctcagtgttctcactatcgtcatcactggcaccgacttttcttaagactgtgttttcatcacaagccccgaaataatccagtcaccatccacacacaatttggagagcttaaacaggagagtcagaaagatcaacaagaccagaggaaaacaaaataatgccaaatcttcgtgagcagcgtatgcacagtgggtggaagcacttgctgtgagcatctgtgtgcacaaatgcacactgggggcctcagtctaaagacctcgagacaccaatgctgttaatcaggtaaaggggaacaattaccttcaaaaacctagctagaaaaagtgaagcagaatctaaaatgttccctttcccagggaactggaaggtcttggtatattccagggggttaatgaaagagagggtggggtgtctggaacaatctctagttaggactactttaggctcattatcatctttgcaaattctacaaggaatcgtctgggctcttgaggcaagaccttgtgtttgtataattcacaatctaagctaaccaggactggggaggtggctcaggtcaaggcgcatgctgcacaaccaggacctgagtttaaatcccacaaacaaatcagccaggagtggttaccagtatacctgtaaccccagtgctggcaggagtggttaccagtatacctgtaaccccaggactggcaggggaatggggaagagcagagacagggggactgatgggacatgttgtacattccagactgagtgagagacttcgtttcaagtgaataaaggcaagtgtaatgaaacaggacatctggcaacttccccttgtctacatgcttgtgcacatgaacacatgcaccagcacactggcacaaaccgcacgcgagagcacgcgcgcgcgcgacacacacacacacacacacacacacagagagaaggggggggggagagagagagagagtattaaaaacaaaataaaattccaatcctaacttttcaaccaaactcacacagccaggcataaatgacaatagcaattagatagatagatagatagatagatagatagatagatagatagatagatagatagatagatataaaaaacactaaaatagctggaagagaagacaggccaaatttgtatcttaagacacctggctaataattatccagacacagggctttccaagttgctaacacattaaatgtctgatggcactgtacagcaactctccagactgtggcagagggctaggaggatactccatgttggtaccctgagaaaataccagctattgacttcaggaataaggaaacgccagagcaagagagtgagcatctactgaaagatacaagagacttgtccttttatctccaacaacatatggagacactgccaacccagaccttggttctactcagagacaccaaggaaagaaggtgggactgagagccaactgcttgagtccctgatttcttccactgacccaagaccccttcccaatttcagtggagatacttgcctatttaaagggctacaatttgctgccactgcctttcagcaacccatctctttccatcgctctgcatcaaattaagaaacttcattttggattgtttgaaagtgagaagcaaagatgccagcaaccgcacattcaggaactttgattttagagcaaaaatgcatcggagtcatccatatgtgttcccaacatgatggacaaacttaattaacctttgctactctgttccaatctactgttttagacaaagctagtgacccagaaacaatatgttaccatcagaatctccatggcagataccaagagatatagccctatcagcagtatcgggaaataagccacttggattagctgctttaagaaatatggattatattcatgtcacacatgagctgtcagaaacattaggatacttttagcataaatcagcagtatgaaggctatcttatgagaactgaacatgacagactgcctgcagggcaaggtgaggttgtccagagcatccctccaagtggacgcaaaagcacattttcacactctttcaccaaatggggaaagattccagtgcagacaggtgactcctagcgggcaccccaactcatgaatggcatgaataggcccatccccctctaagaccatcagggaagcaaatcacatcaaatgactcaagaataaatgaaaacaggtttcgctaaagcgtgcacacctgcgctctctctctctctctctctctctctctctctctctctctctctctctctctctctctctctctcggggaaagggtatggagggtatatcaacgggtttccagaaacaagcctaggaggcagcatattcagtgtctctacaattttcaggcttgattcaaagactaagaaatgagcatagaagacaggagcattctgggaagcaagagccctccattgtagacagagcccattcacattccagctacccactaaccagtggtgtgataatcctgagtgagtttgtttccctgagcttcaatttcctcacttaaatggaactgacaagacctgacaaggctgtgttgagggctaagacaacaaagggacaagaagtggtggccactgtacattcaaggacctcaagtagactaagacaaaatatgccttcctatcacacactttaaaaacatttaagtatttaaatatctcactgtatatgtcaagaaatatctattgttacatttcaattttttaaaagtttaaaaaactcaacattcaacattttacattgctaacacacacacacacacagagagagagacacacacacacagagagagagagagagagagagaagcatatgtgcatgcactcgttcactcactaaagtttccagggcttctcattttctagttttatacgaatacaagacacagtattggactgtctgtcttcttttccccagtattggctgataagaaacagaaaagtcaaaaagactatttatgggatgaaatgtgatgggaaattgtaacacaaataataagaacccaaagacagatattggggttcatgccaaagatcaaaaaagcgaagcagccaagccaccagagagctcttacctctaccaaggatggggaaatcctgacctcaatgtggctggagactaactgccgagtgagcccagcatgagacactgagctgtcagatatacctctctaatgttgggactaaaggataagctctgtttctcttttagaccaattcactttcatatagcccagggtggccttgagctcacagagatccatctgcctctgcctccggagtcctgggattaaaggtatgtaccaccgctgcccagcttctatggctgtggctagctttgcattctgatctccaggcaagctttattagatcataaacaatatatcaccacaggaaatggtattaaaaatgagataaagaggtaacagtttctcctctctttctttaaaccccaccatgaagctgtagaccacgggtgaccctcagaggaccagagacaccaagaagaggatatggagaagtgtcctaggagcagttccaagtggtgtattctctgtagagaattttaaaatacggagactatgtctacctacttctcagtgtcaccgtacactgacaattctaaacaacagaggtgataaaatacccctccccccacctcacagcacatcctgtgcagaccagtgcagcatctccctcccccaggatgctgagctctggcctcaaaacctgaaaattatgctgccctctggttccttaactgcttctgtgtatgctgtacagttgggcacttgagagtgacaatgaaagataaagtttcttatccaagtcttacaatactttgaagatgctttggaactgtgctctcttttctcttatatttctaatactgcactgaaacaagcaaacaaagaaacaaaaacagaaccaacctatctctgctacgtggtcctttgactttagcctttattcaaataatgaggaacccgtaagcatcacagaaatggggatctcaagggatgtaagactcatgcgagtacttaaatgttctgaaaatcatctaactttatatcagatttatatctattagcaaggaagaaaaggttagccaaaagcaaatgtaaatagaggagattctggccactggcccaatgaaatcaaatctgaaagccttcagatcctgtgacccaatgatgtaattttcaagcacatcacaggattccccaaggactgcattctttgctaaccggatgctgctgtgccacacagcaccagtaacgggacacccctgcaacagagtgctgccagacatcttccagcccccggttccactgccagttactcgagtgccccagaacatctcaagcagtgacaccgcagtgcaggtcaaaccgaaccacctctctgcaggccagcctggcacctacaggcctttccaaggctttggcacatctgttgctgtctggatgtcctggaactgctcttggcattgctccatccaggctgaaaaaacaattccttaggatgcccacggccttattccatcccttgtcctcttgagtcagagtcacctgctccctcctcccctaggttcccagaggccagttcagttttctcctgggattccctatatttacttggcactctgagctcagcatatttctcccctaaccacagaacagtaacatctttatccaccctcgacatctaagctgaatatgtactaaagacatacatcagaaaaggagatatttaaagtattcaatgttttccacaaaaatgactgcctactagaaaggttttaaaaaagcaaatgtaagattactggaatgaagccgggcgttggtggcgcacacctttagtcccagcactagggaggcagaggcaggcggatctctgtgagtttgagaccagcctggtctacaagagctagttccaggacagcctccaaagccacagagaaactctgtctcgaaaaatacaaacaacaacaacaaaagattactggaatgaatacataatatataaaataaatacacatgatagcaatggaacatgagttaaaataaacccttcaggcatcaatatagttatggcctctgtatttaatctttaagaaaccaaagtatgtgtctagctctactacatctaaaacagatattatacctgtttgcctgagaaaagaggtatctataaaaatacttaaaatttcacatatctttataaatttccttgatggtgtgtgaatgctgccagtttctctttgacaaaaaaaccagtgtccacctatcatcagacagtagatgtggaggtttcaatgaggtatcccataagtcttgggcatttggatacctggtctccagttggtggctatttaaagaggattaggaggtgtggcctttctggaggaagtatgtcaccagtggtgcctttagcgctcctaaaggccaatgccactcttagcctcctgcctcctacttgtggtttgagacatgagttctcatctgttcctgtgaccatgcctggccctaccatcatggactataaccttctagaacgataagccaattaaatgctttctttttctaagctgctttggacatggtgtccaatcacagcaatagagaagtaattaatacagtggcaaatgaccatttgggacaagtcgaacctgctggtgacaatgtgggccacaggatggacaggcagctcataaacagcaaagactgtaaaaaaaatatgcttggctgagaagaaaagacatggtcaggttcctcacagaattcagaccaaccttttcaggccataaaaagcaccttacattctcccatcttcttcctgctattatcattttaaaatttaagaatatctgagagccaggtatacttgtacatacctgtaatcccagcacttagacggctaagacgggggggggggcatctaaattcaaggccagcctgggctatatagggacactctgtctttgaaaacataaacacaactgggcttagtggtgcactcctttaatcccagcacccagaggtagaggcagacatatctctgtgagttcaaggccagtctggtctacatagacagttctaggacagccaggaccacagagagacagagagatcctgtttatatctatatctaattttatgttaatatattacatgcaataatatattgacacatgaaaatattagaatatattattcacatatattaatatgttaatatataagtacgttagaaatagtaaaatagaaacagacaacacacataaaatgatttaaggaatattaattttaacttctcctgggaactggtgtggctctaagatttggcttcacacagacacacttctcatgggacagacactgcaccatggtggagaaggcagaggtgactacctccctatcgtctgtgcttggaaagtcacttcctttcaccacactgtaacatagctgtcccagagctaggctagactagaaaagaggagctagtgtgaagccgaggacctgctcaggctgtggattggcagacaagtagtcatgggcagctttttaaaatgccctcagtgagatgatagtgccggaacactatccaggaacacccacattaggtgtcttttttggtgctgtttcataagccagaatctgttttcttcctgcctgtatctcagttcaaaccaaggactatttggcgattcccaacgtctcttcactttttccccatatacagacatgctgtggaatgatcaaaatcaaggtctttggcgtatctacccaacactgtctcttctaactatatgaactattgttgactgctgttaccctactgtgcttttctgtgtttcatttggcagccaaacccagtgtgttgcagtccccggtgtgtttatttaatacttgaatgacttccagtgagatgcatagctgtcagtggacaatcattaccacttgatgactcaagactgagaccaaaggaaccaccagaggaatgcaaccccaaggctgtcacctgaccacaccctgactgaggtgggaatgtgaacccagacgtctggctggcacagcttggaaacagctaacaaaagagcgccagctgcgagcctgaaggcgatctcaggcacggctcctgagtcctcccatatttatttctgctcacttgatatgcacctctcccttgtcaaccaggtacaacatgtttatttaagagataatgttgccgtggaggagtgcacaaggcaataaacagcttttgcaggcaattaaatgcagaagcgaaattgagctgctggtcagcggaagcagccattcatcgtgagtttgttccagtgtcacaaatgttattcctgtttcacaacaggacaggaatctatgattgggccacaaatctctgcaggctggagacagaccagaagccattaaagccgttctcagcatgctcggtggtgttcacagggtgcacactctgggattccaggatgctgcccccagaggctgggagaggaagcaggcttgcaagagtgcgctctctctctctctctctctctctctctctctctctctctctctctctctctcacagatttgctactccgtaggtgctgagtcagtctgtggcttgcttgcttttacagtctaggcatgcagcaggcctaactccacataggagtcagtgtctttttctgatgtacaaatggatgtcctgtttgtttttttaggaaatctatctttaaaataaaattatgatctctgctacaatatgtattttctaggaaccaaaggaggtctttggttgaaaaccatctgtactgctgcccagcacacacacaatggctctaagtagcaaggttaagagagctggtatttggagcgcagagtacctgctcaaggtgacgtggctaaatcgcaagttataactggatgtggaccttccagggttaccactccagttcttcccagttcttccatgtgcccagtttcccatcagcaggcctgttcatgcatcactgcagcagaacaggatggagtgagaactccagcacccacttcaggcctgctcatcaccatgctgatctgcatctggtagtttgcagattggtagattgcagctatgctggctgtttgaatgtatgagtttatttccaatagaatttgggagggcggggcattttttaaaagtcaagtgtgtttacagttggttatgtcaggtttaagagggatctgccatatcagagtccctttattcaatcagtctcttaggatcactctttgctacacagacattgagaatgtccctccttatgccttatttgccatcacattcacagaaaattgttacgcagactccaaaagtaacttcaaattagatgcagctttttttagacagtgaccggtgagactaggtctttccagaactcatgaaagtgctaccctcagccacctcagacacacatcagctctcctcaagacacttgtgcttgtttctaaccagcatgggtgaagaaaaacagacgagagtccaagaagatcttcaacagaaaacacagggtttagccctaaacaacaaagggcctgagctgttataggggatccacccactgctgaggttgacttgcaaagacagtgtgctcacaggtatgcccaggggaagacgactcgggcaaggcacattctgcagtcctgagtttgttggcagatccagtgtttgtcaggcactgcgggtaaacacttcaaagtccggttcaaaccctggctctttcccttggtggtgtgggtacctctctcactctttggcttgtgggaagactctaaataccaaatctgtctctcgaagaactaagggagtttgccagtttcccctcccactctggctggcttgtatgtgtgtctaagtaaagcacgacaggaggtgccccccaggccccagcaagatgttcctggtgagtagctaagtctccagactgaactatgacctcacacatgcctttgctggtccctggcagaagagcaaggccaaaatcattgtgtcagggactagcagctatggcaatggttctgacaaaaggaagagaccaatggtttagatgtgattaaagccgggcaacagtggcacacgcctttaatcccagcactcaggaggcaaagtagcgcaggtagatctctgtgagttccaggacagcctggtctacagagtgagttccaggacagcctccaaagccacagagaagccctgtctcgaaaaacaaacaaacaaacaaaaagatatgattaatgttcaaatggagaaggctgtctttccctcaacctttatcaattatcctatcaggttcacagatccactcaactaccctattgccaaaggctaaaaagagccagaaaactggccagtggcaactgacaacccagggcctctgcaggaccattgagaaggtctgctctgtttaaatcttctgtgtttttctgtgtagccctaaatatcctggaacttgctctgtagaccagactagccttgaacagggagatctgtctgcttctgccttctgagtgctggggttaaaggcgtgtgccaccaggtcctggctcgtttaaatctttaagatgtttctttctcaccacaggaagagagctgtcaagagaagccaactgaaaaccttccccaaaccataaaatctgctatgcttgaaagggctgaagagatccaggtggaagtccatcagactcccattatcctcacaacacctctcaattctaatgcccacaagttttaagtctccctccaaacagtaaaatgtggggcggaggaaatgacacaaggagtaaagtgcttgccacacaagcaggaggactagatctcccagacccatgtaaaaagtgtcaaacgggcacggtggcctctccataatcccatcacagaagagcagagacagagcaaaatggctgataagactagtcaaatgcatgcattcaacagagagacctttcctcactggataaggtggagagcgactaagaaagacaaccaagtcaacctctggcctccgtatgccctctatatgcatgtgtactggctcacacagatgcaaacatgaatacatatatgcacacacaaaaatgtaaagggtatggataactgaagagaaatctgtagctcatgggactagtcagatccctggcatggtgagagactccccaaagtgggatgcctagaataataataattccctgacttcaaaagaggggaaggggtgaatgaaacagacttgactaaagaaaaatgtcaggtcataatgttttacaagttggctttaagaaagcttggtcctgcctgaatgagatgatgggacagacttagtagacttcctagaagacgccttaccctctccgaggagcagatgggaggtgagggaggacatgggacaagaggagggagggagaactgcgattggaatgtaaaaaataaattaataaaaataaaaaaacagaaagttaaagactattcaaacaagactcccttaactcttggaaacagaaacttacaacactgacttccagaggcttgggattagggaagtggagagtcacacatcaaagtttctactttcaattttaagttctggaagtttaatgtacaatgtggcagttataatcaacaatgcttggtatctgaaagatgcagactaaatctttttttttaaagatctgatttatttatttattatgtatacaacattctgcttctatgtatatctgcacaccagaagagggcaccagatctcataatggatggttgtgagccaccatgtggttgctgggaattgaactcaggacctctggaagagcagtcggtactcttaacctctgagccatctctccagcccccgcagactaaatcttaagtgaatgtaggcacatacacacaggtggtaccttcattagcttgactgtgatcagaaatgcacagtggcccaatttgtcagttatacctcaataaagctaaggaaataaggagaaaggagggcattaaagatctacaccaactcctggatatatgttacacggaactgaaatcgaatcctggctgagaaagcctcagcatattcacacagccatggcgaacacagttcttgcagaaccacagcatcttctgtggcctggtgacgtggtactaacctctcagctacacactcttaggacgggagtacacaccgcgtcatctagcctgggggtgcgtctagtgctgacacagtagatgacctgctggaaactgttccaccctcagaagcagagccactccagacaaagctctttccccagttaagcaaaacactccaaatgttgaaagtgcttgaccgtacactattttaataatacacacacgcgtgcgtgtgtgtgtgtgtgtgtgtgtgtgtgtgtgtgtgtgctttgaaagactgatatctgatatctgtttctttctctttttttaaaagatttatttattatgtatacagtattctgtttgcatgtattcctgcaggccagaagagggcaccaaatctcattacagatggttgtgagccaccatgtggttgctgggaattgaactcaaggcttctggaagagcagccagtgctctgaacctctgagccatctctccaaccctgatatctgtttctaaaaaacacccacctatattattgggccatggcaacacaacttaattccctttcaaacctttctgccatgcaaacacatacatggtaatactttctctcccagtgtaaacatttttggggagatgacttctcccctgaagctgtacctaatatagtctaagctgccccaagatagggaaggctggaggaggtggggccacagatatatctcactctggccagctgggcatttctgcaaaatggcaatgtgaaagaagctaaaactgagaatcaacccaaataacatgcacaatcccttccaagtccctgcaatcaaactctgaagttaaatggcattatcaacagctggaaagaaaaaccagcatgcttttcatactgtgactacatgtgtgctgaactgggcgcgtgcgtggcacatgtttgcatgcatgtgggtttcacatatctcattaactctgggtcatacctgccactggtttccagtctgtgcaggcacataaggtcctggcagactccgaaggctgttcttcacaggggatcccccaaggggatttcccacatccccagaggaagactcagcagacagggccatggagtactgcgggtagttgtacagattgttgtagtaaggaaacagagatggctggtaaaagctgctgtagtaggcggggtctgacaccaagtcaggtgtgttctctgcatgccctctgctggtgacagcaggaatatcctggatgaccatgcgtccctctaaaaagagagagaaaaaagacttaatgtaagatttaatgtagggggtccacaaatcttgccctctaaaccttggctacgcctgaaagatcaccctcaagatgagcaaagaacctggaaatgcaagggagaaatcatcgctgttgctttaaccacaaggcgagcgctccaaggctggcatcctgctggtggcacagccgaaagaccctgggccacattgtcttcactgggaataccaaatgattttggaagtggactaaatgacataaagcctgacagtgcaacctcaacacaccccactcaaatgccaagaaaccgagatcatatccagttagcctgtctacaaattcttaccacgtgataaagtgactgtcaccccaagaacttagtgagaggctgtttgcacacacactgtttcctttatgtccttccagggtggacactgtattctttagtatgaaccagaatttggaccaggaatagaccaacttgttctgcaaaagaacagttagcactacttgaactttcatgaaccagccaatcaatgctgtgctgcaataaagctttttcacacaattgagaagagatttggttttgcccccaaagagtaaattagccagcctgtcgcattcatcaggatctgccaagaatctagagattcaggtgacaaaccatctgctgattcttcagctgaaatggaagagggtttcaactgtatcctgtccatataagagactggacaaatgcctctggcctccatccaatggacattaactcaaacaatgttctaagagatgagccaccgccctgaaatggccaggagcatcccctgtacaacctacagggagcctgcagtgcagggtgaaagctgcggtggggtttccatcatactcccacccagcataacagcaacgcctgtacactactatggaaactcagaggaaggaaagattaacttgcagtttagagaagaatttgacctttgcaggaaaaaaaaattttgtgccccaccctggaaaaggaaggcgagagctgagggcagggctgactggtgaggcccagggttcaatccctagcagaggcggaggcgggggcagggcggtgagtaaaatataaggtgggaaatgagacggagaaaagaacatggacaaagaaataaaggcagacgatagagtggcaggtaaggtatcaggcaaaggacaggataaagacggggacagattgggctgaaaggtagactggagccaagcctgggaagtctttatctaattctcaagatgggatgtaataggaaccaataaagatttctgagctggaaggttagtggacggagttgtgctatgggagctccacctgatggaaattcttggaaaaagtgaaggaaagatgagaaagaccaactagggaacaacacaaggtcagacagagaccatgttaggttacaagtgtcggggtagccagacacagagacttgtgggatatgaaaacataaagaagcagaggaagatgagacagcaggactgaagacaaaggggagatggagagcaggagtctgggtgtgctctgtctaatgcagacactggacactgagtgaaagtaaggagcttgagacttcctgggaaccacggaggctggaagctgagatctggaatcaccacccagcaatggctacatctggggaatgggatggcgctaaggcccaaagtgaagaaagcaacttctactccacaaaagccaaaggtgagtgacacagattgcagagggttcagctgcagtgtcagcccacactcagcaaccacacaaatccagaactggtcaagataggaagacaggattttctgttgtgatgtaaaggaagcaatagcatctggcctgctaaacagcttgaagcaagcaagcaagcagagatggatgatggcttcaaatagccagatgatcctgaaaggagctccagttctgcaggctgccacatgccccctgtgtctagcataaaataccagaccttgagcagtaagtgtttctaacgaaagaaagcaatcaacaatggtgttttaagtagcataaatatgaggtaaaaactaaagctccaagaaccacagctcttgctacttgatagttactacacagagaagggtccagaataccaaagcatgtagaagcagccagcatgatgtgtggtccaaaagcactcaggggatggtcctgggtacatgtgtggaaggaggaagagaaaacatccaagggagggtgtgtgcactcaaagggtgtgtacgtgtgtgtgtgtgtgtgtgtgtgtgtgtgtgtgtgtgtgtgtgtacgtgtgtgtacatgtgtgtctctctgtgtgtttgtgtgtgtctctatgtgtttgtgtgtgtgtgtctctctctgtgtgtgtttgtgtgtacgtgtgtgtctgtgtatgtctctctctctctctctctctctgtgtgtgtgtgtgtgtgtgtgtgtgtgtgtgtgtgtgtgtgtgtgtgtgttgccaaagactaaaccaggtccttggcacatgcaccaggaagttatacctccagcacagaagtctctatttcatgatcccaactgaggtcaatggtgagcacagctgcatggcttccagcgttaaacatgctgctgccgtaagaaaaaccccaggactggcaaaaatcagcacccaaggagcagcgtgcaggtctagtgctttagcaagatctgatccctgaatcaggggcaatggcataaccctggaacacttactgttagtcagggttcacaaccatggcaacacagtggtttaattttcattttcttcctttgcagacatagaaaacagatgatagattaataaacagtcttaggtactgaggatggaacccagagccttgtacatgtaagctgttctaccactgagtgatatgctcagcctttatgattgtgttttgagacttctgtatgctatcaatagtagagacacattctccaggtgactgtactgaaaggggaggtttatcaaggcttctaggatgagctaagatgggaatgacttagggaggtggagaacactcacaaagaggctaatatgaagggtcataaagagagaaaagaagcaatgagcagataaacatggctggttggcaagggtaacactgagggtcatcagaggaagaaggaagcaatggccgggcagtggtggtgcacgcctttgatcccagcacttgggaggcggaggcaggtggatctctatgagttcgagaccagcctggtctacaagagctagttccatgacagcctctaaaaccacagagaaaccctgtctaggaaaaaaaaaaaaaaaaaaaaaggaagaagaaggaagcgaacctgagtcccccaaaggaagcttggtctgacagtctctaggcctcttcaaagagccaacgtacaccctttatacttgtcagctcaggaccaggaagccatcaactccccttccaagtcttcccagtgctgaggtctcatgccgtgtgcgctcctgctggagaagaaactgccatagtacacacacctatgatcagtctgcctttcctacctgtaacaaccacagtcacggcagagtccccaagcagtatcgaagggtgccctccccatcacagaaaggtcatctaagcaggcgaagctaagtatcccccaaaatggtgaaaaccttcaaattaagatttccactcaggcacagcctctgatcccagcactagggaggcacagacagacggatctctctgagtttgagggcatctgggtctatttggtgaaaccctgcattcaaaaataattttaaaagttccaactcaaaatagccagaaaacaaatcgacatttctacgcatatacatgttactttcataaagttgcttttcatataacaagaaacaggcttcattctgaatcaaggaaggaaaagagttaagaagggaaagctgaaggcaaagctgccactgtaagcatcaccgagtaccagcgctcacactcccttggactcgccctgaattcctcgagccagtccccaagcctcttgcatatcatgtgtgatggtttgaatgaaagtggcccctataggctcacagggaacggcaatattaggaggtgtggccttgttggagtaggtgtggatttattggaggaaatgtcactgggagtgggctttggggtttcagaagctcaagccagacccagcgtcactctctcttcctgctgcctgccaatgcagatgtagaattcttaagattgcttaaattgcttattgtctgcttgcacgctgccgtgcttcccatgacaataaaggaataaacctttaaacataggccagccccaattaaacgctttcctttatgacagctgccatggccatggtgtctcttcacaatagaaatcccacgacttcatgtcagggactttaataaactccacagccaacaccactgatacaaagaccagaggcattgactgcaaaagatgtatcttaatgattgcactgaaaaatctgaaactagataacactctgtctttctggaatgaaaactggccagtattgtttaatgctgttgataaaataaggggtagccatgtcattgagcccaagcaaaggtggtgcttttcctaactagtgaccctccacccaggatcatcaactcagccgtcctctgccatgatgcaaacagtaacagaatgttagatattactcctcactgctggggactgagcccaagacctggcactttaatcaaacactcatgtttgttttctgagccagtgtccccttatgtaacccagcctggctttgaatctgtggtccttgtgcctcagtttctaagtgttaggatcacaggaacacagcaccacacccagaaaatctgatgtttcaagtgttatgactactggcacatagtcataatttgcacagaatatcagcaggaccagatccagctggaagggtaccagaaggcagagaagtggatatcatcgcacacactctgagctccttgtcaccacacatccatctgcaggcctagggcctgtagactaccacctgccagtctaacgctcacacatggctcagtacaggcaccttctgaacatctcattctccgacaagccttcacagtcctgttacttttttttgtactaacatatgcaatgtgaaatatgattcactccttcatgaaagatcaatacccatacatgataaacacctttattgatcttagagtgttatatgctggtctccaggcctgcagcatattaatagtagttaactagtaattcattttaaggtgggtgaaggctttcccctctcttccctagtgtcatgattcccagcattgttgtactttgaatcctctcttggaattatacccacttcccaaatgtgaaggaagaaaaggatcacaaatgaaaccaaaatttaccactgcagactcacttgactcacaatgaagtgttttcaagatgaaaagaagtgtctttctttttgtatctataattcatgcttagtggacatctatgctacttagcttcaaagctctatgtgttgccagtcaggcaaaaccttcatcagtaaatatgagtaaatctgaaacacaagattacccttcaccaactaatacaaactcagaactaggaggtccctgtttggctaacactgctctttgagtatgacattctgtggatctggaaggtgagactagggtgttcttcgctagagcaagaaaacaaactagtcacctgtttgtttgctttttaatcatttttatagggcatttctatatccagattaattagagcctgcaatgtcccacactgaggaagaattgagtaatctaagccataaagggtactgaacagacaggctgttgtttaccagtcccccaaaggaagcttggtctgacagtctctaggcctcttcaaagagccaacgtacaccctttatacttgtcagctcaggaccaggaagccatcaactccccttccaagtcttcccagtgctgaggtctcatgccgtgtgcgctcctgctggagaagaaactgccatagtacacacacctatgatcagtctgcctttcctacctgtaacaaccacagtcacggcagagtccccaagcagtatcgaagggtgccctccccatcacagaaaggtcatctaagagcaggaaggtaaacaacagcttcaggaagtccctgaaatttagcagattcactggactcctccctgacagagtaagcagtctaagctgaagctgagctgaaaggaagactccggaacaatctgagctgcctagaagaggctcaaaccaactgaggcacctggaaagagcaccctccgacctgttgagctacccgcaggctgtgcactgtgccccaggttcccagctttgtaagctgtcattcatgctggggtgggccttgttgatgcagctgtcttaaagtcatttctgctcctgtaactcctcacccatattcctataagaaatcccaataaaactcattggttcactaaactggactgtactgggttccctatctgaaattagtagatgtgtgtgttgcatctctcctaaaaagggcatcacacaacatagctagtgcaaaaacagggacacgacagaaccaaaaatgagttggggaggagtgaatgcacagtcctgtctatgggtggccaggaaggcatgcattgcaggctcagaagtcggagggagaccattcatggaggaagttccaatagagctgtcctttcctgtgtggtttgtttcccttgtgctatggcagtggttgcatggttattgctataggtagcaagacatgcagcaaaggctgagccatcagaattaggtgtgtctgtgggaagaatcccagcacagcagtcttaatctctgtggtatggcctgcttgatgagtggggcccaccatgtgaatatggagatgccctagaaagagttaaaaggtttagaggaaactttgtagtcctggagattatgcacaacggtcgagactgccagcaagcagcagcagaaattgcctgacttctgttgtgtgtagttagaaactcatatgaggccaagatggcagccaggtagcaagctatttgtataaatgagcaattggaacaagaaagggaggtgtggcagtactctccacctcagcctctgatttggcaaataagttaaacaagagaacaagagagaggaggaaagaggagtagaagacacccctcatgtctgacctttagtagaaaaagtgtgcaaagttgtgatcaaacatgcagacaggggccttaataaaggtcccttattaggaacttgtgaaatcaggaaattctcagcaactgaactgctagaattagggaagacttttaacaagcaatcaaagagccttctggcatcccagctcaggttgctgtgggacatgagagcagatgcggttagtctgaatgttacagagccagaaaaactgagtaatgtagctctccacccctcctttaggcaaaggctacataacctgagacagtatgagggaactcagtccctggtgggctgacttatcagagccattgggaacacttggctgcctccatctgaaatcctcataaatgtcggagaatggaaaactacagaggagaagccgatgctattgagggaaccaggaataagaaaagatgtgtttgaaccccagttcactgagccagacagaagttaagcaagttaaggagttaagcaaaggttgatccaacagggacttccaggctggtatggagccttagcagtttcgaggagctctttggtggggcaagatctttataaactagaaatggctttgtcggagctcagtgacttagaccttgcgcatgtaaagagtgtcagtaaagtaaaagaactaaaggagatttttacaaaaatggtaaagcagaaaagggatctgttgcagaaatgtttaactatgtaaagatgtgttgcatttgtttaactatgtaatgatgtgttgctattttacctggcctgcctaaggcacctgactggtctaataaaaaactgaatgccctgtagagaaagaagaggtataggcaggacttccctacagcaaaaggttatgctagaagttcagatggttgtcccagccaggaactcccccaacagtcaggtatggagagagacaacagctacagctacagccaacccagggctcctctgacccagggagccagcaagtccatcaggggagggcaggccatgttcacctttggccctgggtaagtctgaacagattaaatcaggcccactgtggtcactagttgtggagaaatgtaaggaggcctcagaaagaatgactgaggactgcagggagcaaattaattagtgcctcctatccatgctttacacccaactttgatctgtggaggaagcaattgatggaaatggttggaacatttccaggcaatattagaccttgcttgtgttccaactttagtatcatcttagttgtaaaaccccaggatcacctgatacttgttcagaacagatgacaatgtactctgatggttaccaaggaaaccaaggccaccatttgctatggaatgatgatttaggatgttgccttgtcctgcccatcatctgaaaaaggttttgttacatagatgaaataacactggtccccaaaggggatctgaagtgaagcagaagacccctctgtaaaagtaaggagagaaaaagctgaattgttcttcctattgtctcacatacatagcttttgttcaactccagattccatggggcagggaggggaggaatgggaataaagaaggagagcacagactaaagcagcgtggtggtgcacaggtccatatgtaaccacagagctcaggaaactgaggcaggaggactgccagtttgaggcatattggctacacagtgagttctagactaacttgagccacatagtgaatccctgtctttttgtttgttttttttgtttgtttgtttgtttgttttgtttttcgagacaggctttctctgtgtagctttgtagaccaggctggcctcgaactcacagagagtgagttctgcctctgcctcccaagtgctgggattaaaggcgtgcaccaccaccgcctggcttgaaaccctgtctcttataaacaagaaatgaccatttgtcaagtatgggtcaagaataatccagctatctgaaaaggctctctgggcaattcatcagcaattcatctctgtgatgctgaattgtcttcactatctcagtcaaagcagcagcccacagtaacagctatgcaaacgtggctgaaccctcttaaccagacagaaaggagatctgaaggcattatagagatgctctcattcttaatgtctgaagacatttttcattaaaatactttagttattatgctagcaattcacggacttactgtgttgtatccgctgttgggttttgtttcatttgttctcaacttgatacaagctagagtcatctggaaagagggaaactcaattgagggattacctccatcagactggcctgtaagcaagtctatgggagggttcagccccctaagggaagtgccacccctggtctggttgttctgagtagcattaagaaagcaggcagagcaaaacatggggagcaagtcagtgaacagcatctgcccatagcctttgctttagttccttcctccaggttcctgcctgggctcctactgacatcccccactgatggactcttatgggaatgtgtaagctaaataaactctgcccgctccccacctccatgcccaggttgctttctgtcactgtgctggctagttttacatcaacttgatacaagctaaagtcatctgaaaggctggaacctcaactaagaaaatgcctccataaggcaaagctgtaaacaagcccgaagggcattttctcattagtgattggtgttggaagatcctgaccaattgtgggcaaggacacctctggactaatggtcctggacctacaagaaagcaggctgagcaagttaccatgagcacgccagtaagcagctcacctccagggcctctgtatcagctcccacctccagactccttccctgcttgagttactgtcctgacttccttcaatgatcattagtgatgtgaaagtgtaagccaaataaaccctttcctccccaagttgcttggtcatggtgtttcatcacagcgatagaaaccctgactaatagtgttctgttgcagtaatagaaagctatctgggacccttactctaatttatatttctcaacttcagtctttgtttggtatcgacagatatgacccatataagcaaaagttcttgagaccaacaatctttaagcctgctaaggggctctgcaacagaaaggttttaaaacttctatcttctagacatttctttttccagcaattggaggccagtgtctaattatgaggaggctctctaagcaacaaaatcccagtgaggcacctttagcctagtccttaagcctgagatcactgtgacaactacagatggccaggcacctgtccatcaggcaagcaacttgactgttccacaccccagaacctatacctgacaggagcataattgtctaagaagtccttacatgtctaatatgtgggctctagcccatggcaagtgttctgaaaaatgctattactgttatcttgaccacagcacagtcatagcattcttagccatgcagccacaaagcaaagccatcagacaactcccggcaaaagtccttgtctactgctcctcattagggcaccataggaggctggtctgcacctgcagggcttcccaaaggcaacctaacttggaacagagcacagacctcttctcctggccttcccagaggtcagacggtagccttgagtgcagtcagtgtgatatcactccctaaagccataatcaggaagcgcgggaacaatctgcttctcccacaggcagtcatgacagggctattttaaatgtcaaacagaaatctggtgccaggagagcaacaaccactcactgtgcactcttgggaacagggacaaccactactgagtgacagattcaacgaggtggggcacagctcaccattccttctctttccaaaatcatatgcccccctgccctaccccttcctctctgcttttgacttaatgctgctgctgctgctgctgttacagcactttcccaaagacaggattttatttctatgggagtgggggtgggggctgcagtttcagggccgaactttcagcttgctataaagttaatgtgctattcaatgttcgttccagccaagaaggcggggctgtgtattttctgccaccctggaaggccattatcagtaattgcccattacagcacataattatttctcctagcattgtctgtgacctccaggctttgcacgctggtataacaaaccatttcatcttaccaaatttgtgaaggaagcttttgacctttaggactgtagtgttgcactctaagcccacattcggggccaggtgcacattacaagcacactgagccacagcctagactgtttcaaacatcaccccaatggactttgctcacctccacagttttacccccccaaataaaaagaaaatataacataatcaactctccattatggaggagttgatagcccaaacaggaaattatctcaagccctttctactcccttccccttgattttgtatttaattacgtcctaacccctgttctatggctgtgaagagacgccacgaccaaggcaactcataaaagaaagcatttaactgagtgctggcttacagtttcagtccattctcattatggcagggagcatggcagcacacttgatgctgaagcagtagctgagcgctacatcctggtccacaggccaagaaagagacactggaccagctgtgggtgtccgaaaacctaaagcccacccactcccacccctcggtgacacacttcctgcaacaaggccacacctcgtaatccttctaatcttttcagttccacaaactgtatcatgctttttaaatcccatgactaggaaaaggtagactagagcaaatcatagaaagagaaactctgaagttcagggagcagatttgctcccccacttatatgatggaggaagaggaattatggtcaaattagggatgaaaatgagatttggggatttaaatgatttttaaactgacatccagggccacaccccttacattcacacaactgttcaatattagccaggaaagaacagagggtgggttgcaagcttggccattccttggtatttcttctctactggcatcttctctggaagccccagtgttccctgttaatggaagatacacctctatgctaccagtgttgggaaacagccctaaggagtaaagacaactggtattctctatggtccccctgtgtttccttcttcccctcctttggaataaagctcccctcaaatgagagttgcttctgcaaacagatgctcgtcctttctttcagccttcatttttgccaaatgacatcatataaaacactaagtttagagaactaaacttagtgacggttacagactgagctttaaggaaggccctacaagcagttttatccgtcttgaagtgcaagtggcagatctagacacacacaggtaactgacagtgagccccaggaggagacctggcatttgtcctctacgatacacaggaaaggaagagagtcatggcgagtatggtgtgtggatcctgctgatggtgacagagagtctgtcatttacagtccttatggtctgaagagactgaatggctcctattagaactcagactggtgggcctaggccctatcccaaaggatacaatagactctgatgacaccctatggaaggcctcaccatccagggggaacagaaaggatatgtgacaggtagggttttagttggaggggcagtaggggaggacgggtgggagaagggaactgggattgtcatgtaaatcaatcctgtttctaattaaaataaagaaaattgaaaacaaaacaactcagactggaggtatggttcacagaggccaagcattctcaagacgctgtgacaaggctggtacagtcaaggtcatcttttcactgagaaaggctgagtaaagcaggggccaagggtcgtgatttggcctgtggctgctaggcactgtcccagagccttcagttggggatcttctggtccatccttaaagcaactccctttatgctgcactagcacctctggcagccagctgcagccagcatagctgctgtgtgccattcccaaacagtgtgctaagtgaccctgaaccgcgtacagtgacttggtgccaagttctcaatgtcttgacagctacctgctccatcttaaaattgtcagccactgaggtatagagggcacttgtgaaaatgtcactctagaggctaggacaccaagttccatagagacaggtgacatacatagcttagccaatcagatgtggcaccttaggcaccttactatcattgttcttctggctggcatcacagcctgtgggttttagtaaagaatggcagaactgtctgttttgccagcaattcaaaaacaggaactgggagagtaagagcagactctagaaactaagaacacatgtgtttaatctggtgtatgtgtgtatacatgtatatgagtatacatacacacacacatacacacattccttggttccatcaacctctcaatctcctgcctcagctctgggtgctgagatcataaatatgtcatcacagccagcttattttttgcttttctattgacttttccctccctccaccccaacgctgaagatataactctgggttccgtattagtgtgtgtgtgtgtgtgtgtgtgtgtgtgtgtgatgtgtatgtgcaggcttctgcaccagggtcctttactcgcagagccattttcccagcccccagccttacattttgctgtaagacagggaacaacagttttctaggctggtcttgaattcctacattcagatggtcctcttacttcaacccaagtatctatgataatgaagtatgtgtcaccacactagataaaaatattttattctctccttttcttttgatggagccgtggtttcaccactctcgggaaaatgctcttccactggactctgttatttctagctagctagccctggttttgcttatcacaagttagaaactgcatgagattatcacgagttatactggatctgtctaataaactactaaggtgccaaaaccagtaacatgataaaagccatgtcacaggccactcagtcacctgcttcatatgagaattttactttccctttaatgatctgttataaaggctttgtacctctggatcaccgggaacctaacatgccttgggaaattccatgtcacagaagtaccaggagctactcggtggccatgccctgtgtggaaagaggacgtaaagttccacaccaccaggcacagtcaggaaggggcacctatctggtggcagggcacctatctggtggcatagtcttgtaagcccgtgggcagcactttggtatcatcaaccaacccctaaactgtcctgggagactgaagcttcagtccctagtggataagaaacaacactggcttcttctacgcagaagaaatacttgctggaagacaggagaacacagtgtttctttccttaatgaacaatgaagcaagggtcatgacttggacaaacagtccatatgcctatgaagaaaggctttaaattatggtattggctgtgagtaagaattacaaaataaaaacaccacagctagattgtacctttaactctttattataccattatacctttaatcccagctctctcaagacagaggcaggaagatctccaatgagtgtgagggaatcttggtcaacatagcaagttccagaccagccagggctaccaagtgagactgtctcaaagaaataaatatttcaaaggttattaaaattcccaggaaaaaaaaagaaaaggaagttaagacagagacatctcagaaagttcctttcatgtgttcagaatgtatgagaaaattttcaatcaagatgagcacagcagaacttgaaaggaaggattctgctcagactccttaagagtgtggtgttatggaggttgtttatgaagtcaccaaatttgggtgctggagaaatggctcagtgtttaagaacactgactgctcttccagaggacccaggtttaattcccagcacccacatagccgctcacaactgtccgtaatttccaagatatgacaccatcgaacagacatacatacaggcaaaaacaacaatgcacatagaataaaaataaatgaagtcaccaatgggaacatgtgatttggtatgttcagaaatgtctggaaactggataagccagccacacacactccacattcagtttgctaataatttgaaaaggacttaaaggactttgtccagagacaaaggtcagtgatacatacaatgattgtctaggatgtgtgaggccctgggttaggttctaccgcttaagcgctcgcactcctgggcacacgctcgcacacacatgcatggcacatgcacattcatgtgtacacacaccccatacaaagacatcaaaaagcactacaagaaatgagctgaaggagaaacaaaacataatctaatcatgtctgaatataaaaatggatccaaccttaatgtctgaactagaaacagggtccatgatttttgagaactcaaacaatcctggtgtccctatacaaaacatatagaatctcaacaaggaaaacagtccaaataaataaatgtttacataattaaaacagaaccacacacacacacacacacacacacacacacacacacacacacatatatatgcatatatacatatgtgtatatatacacacaaaacacatatatttgggcgtgtttcatgtagttcaggcagcataacccaagggacaaataaaatgctgggggttttattgtttgtttgtttgtttgtttggagacagccttaatatgctgtccagactagcctcaaactcaagatctatgctctgtcgaggtgttaagaaataggagccctctacttgcactgctgtggagatgtaaagtgttttgtagaacagatgttcctcagagtaagaaacacctgagagccatcaattctactcctggtggtacatgcacatgaacgctctctactgcctggtgggttcatataataggatactaaacaattatgcaagaaaaattaaataaataaatgaaagtatggatatttactacacatggataaaaccttaaaaacatggtgctgagtaaaagaggccacacacacacacacacacacacacacacacacacacacacacacacacacctaccacattgagatgtccagagtaggcaaacctatggagaatgaatgaaacactagtggtggccagaagctgtttggaggagcaaatgtactatgactgagtatggatttgggggagcagaaagccccatgaaatgtttgagaattaaatgatggataagcaactctgttagcatattttcaggggtgaactttatatggcatatactttacgcctaggtaaagctgttattactttatagttaccctaaataatatgaaggaaatataagaaattgagtttaattgattttttaaagaaatagttgttgatttaaaataaagcaggagtttatagcatttcttcacaaactccttaaagaatcaaatgaaaacacaacgcaaatcttcttagagaaatagagttcagaaggtgttgggccttggtggcacaggcctttaatcccattgctcaggaggcagaggcagacacatctctgtgagtttgaggtcagcctggctatgatccagtttcaggaccaccagggctacccagagaaatcctgtctcgaaaaactaaagaagttcagaggagaactgaaacccgccatgtactccagtttttaaaaggaggttatgacacatcctagcatcagaacatcaccttccatgcacaagaccccaagaagaagggcttaaagagtcaagagaaaatatgagaaattcagggtcctagagccttgtgacttccctggaccagggaagtaccagcacaccttactacagagtcagaggcctcaggcctgtgcctgaaagcccctcacagctgaagagtagggcttagtgggaaaatcactatggatgccatctcaaggcaatcacaaaagtcttcctcagaggaggtaacagactgttcttccttccatgtgagtaatcacagtttgttccagagagaatcactagtctggacaagctccggtgacacacatgaccacatatccagcaggcaggtgtgttcctaggtccagcctagttggcaagtccaccaactccagactggacacaactttgcttatcactgacaccatgaacacttgcattaacagctaaaatacgtgaatgggcagacgcgaagaaaaaaggtgattaccattgccacagaaaatacgacaccgtaaaaacaagatgaaaaaacagtaagaaacagattattaaattctcagggactgagcaagaagagctagggaggagaaacaaagtccctgcagattaaatatggcgagctttaagccaattataaaagatcaaagacaacaagaaaggggaggagtagccttacaagtaactgagataggaggccttgggagaaatatggccagggagaatcattacaactaaagtaatccaggggtgactttagcatgaaattcactaggaaccgctaccacaggcaactcacagggacagaaaacaaaaggctgctttttttttttttttttttaaaggcatacaatcccaaagggacaaagataccagactggcacacaggaaactgccattgaaaaatggcaacatcttcagccacatgttagatttctatgtcaccatggcaatggccttcaccgaatgccaccacagttaaaggtaaggaaaagggtattgtggcattggttcagtaatatccttgaaatggaatagcactgttccctaatacaaatctgatgcttgagccgggtataatgacacatgcctgtggtctaagctacctgggaagcttgagtccctaaacctaaagccagccttctaagagaatccatctcttaaaagcaaaacaagtgaccagatgctgccttccatttttcatacatgtacgtaatgtgtttcagtcatacttgcccatccactttctgaaaagctacttccttcagcacactgcttccctgcccccctgcattttaatgccttctttgctctagatgagccagtgagttccactagggaaaagccctttaaatatcaacaacctcctccaaaatgccaactatacctaggacctcagtgtttaccaagaggagccagacctaaacctgtcaacaaaagttgggctaatgttgagtcattcctttataacactctgaaatttaaaaatctaagttccaagtgttctgtccatggctatgcacaataacccctggaatcagagagtacggggagccagatggaacccagaaaggtgcctggcacacatgcacctaacggaagtctgctttaaagtctaggccactggactccaactctgtaagtccttgcaataatgatgaagaacccagatatccagatctttcctttcttcacagctagagactggagggcattaagtatgcaccctactgttgaactatagcgcagccccccacacacaacaatccacttttactgtaagtagcttattctacctaatttgttttgttatggggacaccctaactgaaagcagcaggaccagaaaggcagaataccacaaaaggtacccatcccatcagcatgagaggtccaggataaggcctgatatgacaaaattcttttccttaacaagattgtccagaacactatatagggatggctaaatacttatgggattaagaaaactaatatattcataatgtcacttactgagaaaatatctctcaaaaatgaaaagagggctggagagatgattcagtggttaagagcactggctgctctctcagaggacctgggtttgattcccagtacccacatggctctcctaacagctacaactccagttttagggattcaatgtccttttccagactctgcaggctctggcacatatgtggtgcacagacatacatgcagacaaacgcccatacacataagatagtaagatcagtagtaaaaaatgatagtaataaaaatggttagagactagaaaaacagagttctgaacaccaagcattttacttatccctgcccttggatacaaaccattacctggtggatcccaactactactgtagacacagtgaccggggccatggagtctagcatgattgcattccagactgtgctgtgttctccaaccctgccactcaatacacatgtgtaatccagcaagccattgaatctcaatattcctcgtaagcagaaaaaatagttcctattttacagagttgttgtaacagttaaatgaaaataataaataataaagcagctaagacaatctctgccataaggcagacactcagtgaaaaagaaagctggtcatgttagaattactactaatacctctggaaaccaataccggagttggaaattaaacaaagtacacatcagagaaggaaagaatgaagccaacaaaataaggaaaatgagattcacactgtatgggtccttggttcgagaacatcacttcatcttgccatcctggctcctggtgacaaaaactagtaagagaatgacatttctttgcttaatcacacttcttaagctttgttttttttttttttcctcccagccctattcaatttcctactgcttctcgatgcaagcttttgttccctgtcaaaatcccctccactgctgtaaataatctttctccctcttttatattacctttcaaatatttatagactgttattctccttccctctgagtcatacatcatttttgttgcccttctcctggattcgccctagtttatctacatcttttagagaaaaacaaacccaggtgcttcatggtgaagacagcgcaccaaagctaactgctaacagccccaaccaatacctcttatccaatgccacacacacacacacacacacacacacacacacacacacacacacacactcactcactcactctttgatgtgcctctgcctccttttctccaataactcataatttcatctctaagataactcaggagagactgataaaggaacacggatgacggggtgctgcaagctagctgctcctggggaaggatgctgggggaaggtcccctcctactaatgagaaattatgcatgctgtccactacttctgcttgttaactccaggccacctcctgcatttggtacccctgcatttgctgaatagcatccatgagaccctcttttgctttgtttggccttaatggaaagacaagctaacactgtttatttgcaaacaaacccaggttttgtaagtgataaaaagaaaactccttacactatacaaaattaactcacagccaggctgtcaagtaaacagcccctttctcagtaggaaacactgggacctgcccagttcagggtctcctcctttcttctcgagagtgtctctatcccatgcccacagcacacctgtgtggaggccctgctgcttactctctcgtgcgtgttctaatgtgtgccttccatctcagctgtgaggccagcaaggttgtgaggtgctcccccaatatgctgaagctaaccccaaacctcagaatcctgagttgtgtggctgtacaacactccttgtgacctttagaaaggataagatatggctaatactacacacactatcagcgaaattgacaaaaagaaaatcatgacctcgaaaagggagaagctgacttatatttttttttccgaggcagggtttctctgtgtagctttggagcctattctggcactcgctctgaagaccaggctggcctcaaactcacagagatccacctgcctctgcctcccgagtgctgggattaaaggcgtgtgccaccaacgagcagctactgacttacattttaacgtgaggacctaatgttctagtacagttgaatgtgatggagtatggagagacttagtgtgtttacattccttatctgggaatataatggttactgctcaagcagtttaatgtcttcaattttgttttttacttgtttttatattctatgtacaggtatgcactgcctgtggatgccagaagagggcactacatcttggaactagagttacagatggttgttagccaccatgtaggtgctggaggttgaaccctggtcctctgaaagagtggtcaatgcccttaaccactaagccatctctccagccccgtcatgcagcttaatttttacaaaaaaacagtttatggctgcacggtagaccacaatcatgcttgttcagttgcccatagcaagaactcatccgaaatgtgtgttctaattcttgcttttatacttctagtctgaaaactcattttttcatagctattatcatatttgatgaaaattgcatatcctaagtatttcgtgaaaagatataggtgtgctaacaaatccatggagcatatttaatttactttgcaagtgaaaaaatgaacacacaaaccaatgaagtggcctttcccgaccagagaggtaagaaggccgttagaatcatctctcagattcttccaatgataaaaatttatcaaaataacagacaattcttttcctaagtaccttcaatcttcaaggcctttgatcaagcattttctatcatatgctattctcagagaggagcctggcattgtatctggtattgtactgcaacaccaatgacaagcactccacattaatgaaaaattgacttcaaaatacctcaatgactagttagtctctattaacctttatctgactaggtagacccttctcggggtctgcaattgagccaaccaacttcaactgaaatagattatttttcagaattacccaaatctccaaaatgtctaacttgaattaggccgaatccacatgaagtcattagtgttccgggcttcctccactttgcagatattagctctctcctacactcggctacttgtttcgtgtctccttcactgactatgtggtatggcctgatcactgcctctagactatatatatacaaggctattgtcattattctttaacaatatagaaaaataaccctttcttgcaggacttggggttgaacccagaccttgtagccaacaggcaagcactcaagctacacctcaggccattattacagctatttatggagcatttgcatagcatcagttattgtgagctctctagagaagattcaaggtacttgagagtccagtggttaatcttaacatcacccaaggagctctagaatcgcctgggagatgatgggcctctgggcatacttatgactgattatattgattaggttaattgaaatgggaggacaggctcactgtgggtagcactattccctatgcagggatcctggactgtataaagaggagcaagcaagttgagcaaggcactcaacagatgtctgcttcatgactgtgaatgcaatatgaccagctgcctaaagctcctgctgttgtagattctctgccatcactcactacaacctcatcctgaggcaaaataagcccttcctttcttaagttgctttgtcagtatattttatcacagcaaaagaaaggtaacaaatattcaagatgacttgacccttctagaattttatgtggggtgggggatgtgaatccaatcctctaggctaataggacacagctgtgcatctacttattccttaatgtggctgtaaccatagtttactacataccaaacagtagcactggaacttcgatatttgcattgtaattcataacagtagcaaaattatagttatgaagtagcaataaaataattttatggttggggtcaccacaacatgaggaactgtattcaagggttgcaacattaggaggttgagaaacaaatggctgtgaaatgattcagtcattgattgacacttttaacttttaatctgctgtggctagaactgaactagaagttgaagctggattaaaaaaaaaaaaaaggaacacattgctatagcctgtttggaccattttcactggtctggccaaaatggcccaatgagaactgaaagtggtggtctggagagattgctcagtggttaagaacactgtctgttcttgcagaggacaagtttgattcccagaatccacatggtggttcccaactatgcaacaaccctcttctggcctcagcagactctacatgcacatggcacacatacatataatgcaggcaggcacaaatcacacatacacacacacacacacacacacacacacacacacacacacacacaaataaatcttaaaaaacagaaaaaagctgcatcttctggtcctttgcctgccctcccgaatgctcagttctatgactcctcttgtctctattctctatggggccagtcttagtgtgccttcagggtctagaacaccaagtagtaggagacactgcaattcttatcacatacagtcaacttttataaccagcaggaaactccagtacgttaagagaaatgggcaaagggcaggcatggatggttcactaaaaaaacaatgcaaatagcacttaaaacatatcgtcagctgagggggtgctccaggcctccactgcctcctgcctctctagcggtggatggaggtggttatacctttcaagctggcaccacacacatcaagtgtgtcatcttctgtttggcattatctggggtcgccagcaaagcactctactcttgagggttcatgtaatcagatcccagaaaaccatggatcatacgaaagtctttgcttaatgttgtctaccgagtccctgctggcattcaaagtcaacatcctccctggactgagattaggggggacactgtttccctttttaaaataactatgtgtgtatgtgttcaggggggttgatgagacacctgtcataggtgctgggaactgaaccccaaccctctacacgaacagtccatgttttccatcactgactcatccctcctccaggatacattcccccaccccaccccaccctaccccacccttttttttttttttttaaagaaaatgtctagtctccagtttgggatcttcctgctgcagccaatgccaggatgagagaaaagtttcactacacgcagcctttaaggtcccttcattcctctgaccaagctaaaatataactgttccccattcaatctggtacagcccccgtgagagcttaattccagagctgctatggcagccactgtctggagggagtgccacccatcacagctacccaagtgacaggtaaccttaccgccaaaacaaccttctgtcccatgctttctgtctctactgccaccacctgtccacacagctctccattgagccttcccataaacccctatcccattggcccctatcagccacactcagcggcagaaatattagacgaaagtaaatcaggccacatgctcaccgcttcaacacttcaataactttccatggtaatctaataaaatcccaccgcaccccggttggcctacacagcccagggtgatgcaggcccactaatgtcaccctgttcaagccactgcagacactggccatctgcctgccgtaagcagtttcgccctgctctcccctcaaccttaaatgctttcccatagaccctgcctggaacaactcattaccaccgtgaactagctcaaactcattcttatcggagaggcttttctgcctggaccacactatctgagcagctagggtaccatccatcccacccatcccatttcgttctcttcgtaacaaccattcatgaaaatacctcgattatgtacttatttatccaatatctctacccctaaaaaaaaaaaatgagacacgtgtttcatgcaaagctatgtatcacatgcttagaacacagcctgctcaatgagcatttgttaaataaataaaacgaagaaacctgaagaaggtaaagaagaagagggaagtctacagagggcagactcagcaggaaagtatttgcattagcaaatactggtgcttcgggaacacaggtcacgccactgacttaaagtgtcatctgtgtatttgagatagccctcccccgccccaacacttactgtgagctcagaattaagggaaagtacaaaaagagagaataagtgtggaaatcaatgccgaaagtcacgtgttagtgcacaatgaactgacctgacatttggctggacaaagcaatagctaagaattcctactcttgagggttctatcagaacatcagaaaatctgctataactataacactgaatcaatattttcttttgacaacaagccagctatttacagtctactttaaaagtcactttcccattttgttctggaaggcatgttcagggcttgtaaactaagaccagattagcaattatgaagtcggtccacaggcgtaagagaccagagtcaacttggtttgcaatgtaatttgttcagcaacagcgatcaatattaatgtgaattttcacgagggagtcaaaaacggcccgtgaatttaatttttttgtcaagtgaagggcagatagctcagatggaggcagagatgcagcaacacccttgccattagtttgtgaaaaccacaaaacagtgtcagactaattaagaactaattagagccactgagggccacagattccccttctttcatgtgtggctgactgcatgcctaggctcagaatccaggtcgtttgaccaaggtatgacatttctcaatgcatgagttcacaaacctgctccttgagagatctgagtctcctttaccccagaggaatacataaatagaacagacccagagagaaaaaagaaaaggcaatgacacagtacaatgacactgggaagaaaacaaagatggatgctggaagggattaaaggtgttttaacacacacggtttacaggtggtttcaaagtctgtgatgctgggaagaaagcagagctggtccagggggcttcccaaagacgagaggagcagatgctgctgtctaatgagaacaaaatttcagtgtgggaagtcctgaagatggacggtggtgatggctgaatgcataaaaaaagagttaatatgggactggagagacagctcagtggataaagtccttgttgcataactgtgaagacctgggttcggatccccagaacacacataaaactgggcacagcagcaacatgtgtaatccccgtgttcccatagtatgacagggaaggaaggcagaagagtccttgggagctcaaagggccagctagcctggcctatacagggacaaacaaaaagccctgactcaaacacgatggaagatgagaaccagcacccaaagttgtcctctgacacacaccaggatatgcaaaccatgactcatggcacatacacacacaaaaatcaaaattaattacagtatcacagcttaaattgcagtgtagtttgtgataaaagaaagttttttttttaagttagttaataaaagcaggacaaagaggcattcacgagaccagaagagaatcatcaagttgacagggcgagcaggagccttcagctagggctaacataagtatgtggtccaaagactccagggacgggggagggacactgatgacagaggagcagcctctgggattgcacaggtttcctgtcgcaagaacgacaagactataccacctgagcatagtacctagtgtcatcatccaaagaaacttctccaacactgacaggaaatcctgggtccttgtgatctaacctcttccaaagataacatgaaggacagctgtccatttcaccaactctcaggttctcagagacacaggctgggttttagcacctgccatgtctgccataagaaagtcattgtatctcttcgctttagtattataattttcattatttcatcagactgaaaaaccaaacccaaggccttgtagatgtacctgccccccccccaactgagctacagcctcagtccctttctgcaaacaggagtttgctaaattagcagtgctggcctagaacacccgatcatccctcaccagcccctcagtccatcagacagcttcaaaattgtaggcctatgccagtacacctagtttacctctttatttaaaaaaagattgaagtttgaattttcttcatacattgctggtggggaaataatagggcacctccacaggaaagcctagcaagacctcaaaatgtcaagcacagagttaccataaggctcagcaacctactccttaatgtacaacaaagagaatgagactcacatttaaacagaacttgtgaacctaaatacttatcgcagcattgctcttaattgttaaaaagtgtgtaagcagtccagatgtccatgaactgatacgcagaaaaacaaaatgtgggtaatacctgtacagtgtgatatcaaatactagttaaaggaagaggagtaagaataaatccatgctgcaacatggatgagccttgtaagtaccaggcatacatgtgggaaaagacaaacacaaaaagtcacacttcttatttcatgacagtatatgaaatgtccaaaataagccaatctgtggagacaaaaacaagttagtggatacccagaaactggagaagggaagagatggggagcaacccaattagatagttcatttcacaacccccttagtttattaaaaatatgtagtttatgctttaaatgggtgaattatatagcacaggacttttttttcttactctattaagaaattaatatcaggggctagaaagatagctcagctgatgtgacatttagcttccattgtcaccttgacaaacttagaactgcctgggaaaagtttcaatgaaggattgtctaaaatggccagtggtattatttaagttaacccatgtgggataacccagtccagtgtgggcagcgccattccctaggcaaggagtcctgaactgcataagcgtagagagatgggcaaagggagtagggaaattaagctgagtgcaagcaagtgagcactcgtacatttgttccctctgttcttggctgggggtctgatgcagccatctgtctcaagctcttgatgctgtgacttccttgcacaaatgggctacagctggaattatgagctaaaacaaaaaccctttctcccttaagttgttttttgtcagggtacttttttttttttttttttttttgatcactgcaacagaaatgagactagaaattggtaacgtgtttgttgtgaaagcctgagcatctgagttcacagcatcagcaaccatgtagaggatgagcgtggcggtgcacatctgtaaacccagtgctgggggcaggtggaagaggcagatccctgggctctctcaccagacaatctagccaaatggtaagcttcaggtcttcaagttcagtaaagagaccctgtcccaaagcataaggtggaaagtgactgcggaagacacctgatgtagacctctggcctccacacataggtgcacgaactgagtgccagtgcacatgctcgcacgcacgcacacatgcacacacacgcacaatcgcacactttcacccatatgggttctggggattgaactcatgtcattaggcctggcagcaaactgcctttacttgctaagctatctcaccagccctaaatttccaaccatttaacaaattttttctaaggagtttaatatggaaatcagtatttttaccctcatgcctataggtgagtccatgctcactcatgatttaaaacaacttcaccaccacttactgattcattctgaaaaggcttactgatggttgaccataaagcctgatactgtcccatgcagggaaggataaaatgagtcgatgcaatccgtgcccttaggctttgttttccacaggcaggtgtgaaccagttaaaattcttatgtgctttatatgctgtcataaaatttacttgtgaccttaaattctgtatttacctgtttcatgagtttaaacatcctttccaggcaaaatcagaatgacaggctaccatctctgtaggttatagttctaactgcactaaaatactacccagagaattcccagacgggcaatacacttgtcggatgtgacacagaagcagtctggcccaaaacaaacgccactgagcctgttcacagcaacaggacatgggatggacaccaccacccagtgttttcttccaattcagcctcccaatcactgagctcatttaacttttgtttgaaaacatttttgactgtttgtttgtttgcttttgttttgtttttcgagacagggtttctctgtgtagctttggagcctatcctggcgcacactctggagacaatgctggcctcgaactcacagagatccgcctgcctctgcctcccaagtgctgggattaaaggcgtgtgccaccaacgccggcctttttgactctgaaagtaaaatttgagagtgtttttatctgaacgcctttaactacttaacgtgtcccattctacatcatattacgctcatcttatccaaatctccagtctttacagatgagctccctatccaggttgtttgagttgcttttacagccatctgaatgaaatgcttccttccttacaaagttaaaaaaaaaaaaaaactgcagatttaaaaaaaatgaaatgttattttcaatttctataacccaggagagaaggttaacaatgaaaataaaccatgtaaaatggtgcagtggtggatacacatctatctgttggaatccaaagaatgcatggcaccatgagtggatctgagcgtgtaccatggatcctgggtgatggggatgtcatggtacaggctcattaacaaacccactactttgacaggggatttagctataatggagaaacctacgcctgtgaagggccaaagatatatgaagatccctatgctagcctctccattttggggcaaacctaaatctaccctttaagaaataaagcctatttttctaaagaaagaaaaatgtaaacaatccgttgtcctaacttgctaaatcatgagccctttctgaaaaaaaaaaaaaaaaaagtgtgcggatcacttcatattcacagggctacagttcagatctgctgtgtgctctccaagccagttactgaagagaagtgcagaaggggccttcctacagttagacacagacccaggggacccaactgggaaaggggagtgaatccaggccactgggctccacacaagcaggagttgcctgagagagccccagacagtagggcggggcttgatctgggggaggatggatatgtgtgtggatggaagtccagggtgctcctgaagggagagcccaggagagataacattcaggtcctcacaaaggccatgcatgcaaaacccagtgctctacaatgcaacccttcatctgacagctgtgcagtaaaggagaggagcagagctgtgcaggcctcagggaatgtcacgggtaaacagtattcctggacacagaaggagagctgtgcaggcctcagggaaaggcactggtaaaacagtatccacggacaccggtgagaaacactagctaaaaacttaggaaaaacttcaatttattctaaaatccaaaagatgaaatagggaaaaactgctggaactgctattttaagtcctttgtggcaccccctaaaatgttctttccctaggtgccccccaaagtgggaaggagctgtttgctaatctgtggtgtacctgctggcataagaaccaataatgaacagggaatttattcaaaaggctatttttatgctaatccccacccaaaatagcaagacactcatagccattacttgaggtcggtcccaaccagcctgtggtttgtgttagccagtccctgactaagtgcagagatcatctcccggtgcatgtcccgtcctgtctgtaggcctcagttcctcagagctcagcctggtgaaccaatttcctttgaagtatcctttacaactcagttaatagtctcgacaataattctcttactcacatttggcattttaaggagccaaaagaagataactgagattcaaggacaaaaaaaaaaaaagtccctttcattttaccaagtgagaagtcatgaaaagacagcgagagtttacttccaagtccctagggagccaggctggcagattttactatgccagcaccatgcctaccccttttgttggttactaagtcacttccaactctgtcttcccatatctgtataaagaaactctaagccattaagaattccaagctgggctggagggatggctcagtgattaagagtacatatgctcttgcaaagggagggtcagagtttagttcccacaccaggcagctcacaactgcctgtgactccacctctgggggcggagggagggtgtgtgtgagggggtgggagctgatgctttcatacctccatgggtttctgcactcatgtgcagcccccatccatatgtgtgtatacattatgtgtatatgtatgtatgtgtatatatatgcatatacgtaattaaaaacaaatctttaagaattccaagctgtattaagtgaaaaggctgtgtataagcattatactcgtgtatacaataagggtaagaaacttttacatgcagcaagttttactgaaatgatgcatagggacttcaggctggactcaaagaacaaaggtctttcactaaagacgtgtgtgtgtgtgtgtgtgtgtgtgtgtgtgtgtgtgtgcgcgcgcgcgcgcgcgcgaacgcacacacgcgcgcgcacaccagaggctggtgtcaggtgtcttcctttgtcattctccattttatttttgcaagatttatttttacatttacacatgtttttgcatgtatgtatgtatgtatgtatgtatgtatgtatgtatgtatgtatgtgcaccatctgagtgtttttatgtgtatgggtgttttccttacaggtatgtatgtacaccatgtgttatctctagtgcctacagaggtcagaagtgggtatcacatcctctggcagtgaagtacagagggttgggagccaccatgagggtagtggaaactgaaccctcatcttctgtaagaccagcaagtactcctaaccactgagccatctctccagcctctgtgcttcacctttcttttcttttcttttctttttttttttttttgagagggggtctcttactgaacttggaacttgaccaggaagctccagtgatccacccatctctgctctctccaccgcactgggttacacacacactaacacataggacttttccacgggtgctggggatctgaacccaggtcctcatggttacacagcaagtactttacccactgtgccctctccctgcctccgagtgctttacactctataactatttagcatttaaattgtgtccaatttaagtgtgtgtgtgtgtgtgtgtgtgtgtgtgtgggtgtgtgtgtgtgtgtatgggcctgctctcgaatgcatgatacaagtcatgtgtggagttagagagtattaattctctccttccactatgggttctaggactcgagtcatcaggcttgcatgacaagccattttaaccattaaagccatctcactagaccactcactatctaccacttgcctgcctgagctaagtgttatttcacatgaatctctataatatatgatatgtgtttgctagtagcaagctacctaagaacttggcttccatgtgctgcctaattactgtctctcctccctctagatgcagtagtttaattctaatcccatctccatctccctgatgctcatcccctgacctggtccagaagttagcagctgcagggcagatgtctcacagatcagttctgtgaaggaggccactgaagctcggcagagctgaactggctggtggggaacctgtctcctccggaaggcagagtgagcctccaggccaagcctggctcccacttggtccccagtaaataagcacaacacagactggcccaaacacccccttccctatgcttcaagatgccaagaggtttgtgagctcctggggcaaaacaggaaatggggttgggatcctccttgaccctgatccctcttctgctcacctgtggctcctttcagtaactaccagcaccccttgaacatcccctgccagaacttccctggtcctatgaagagtcaagtttggagactattctatgtatgtactgtgagcatcgaatccaacgagaaacagaaagtactgtgtttgtgcctttttatttatttttttaatactggcgccaaaactggcagaaaacaatactcttcctaaagaaatcagatgtcagactgtcttctcctaggctaattacatgcagggtaattatcccataactctagaagaagcagagcctcacctcccagctcgcagtcagcacccaatctaaactgtagcctcagtagctgggggataaatgtatcagtgtaccttctatgcccttcattgcttgggatgtagtcccatcgccatacattaggggcattggtaaagtgtgcctttgttaattcaacaatctacaatgaaagaaatacagtcacacatacctgcttcttggaggcacgcttaccttatcctttacagccaagattcatgggaaaacattgcctctcccctccaggaaccctctcactttttgagagggggaaacaagaagcccagagtacctgagcaacttgtcttaagttgtacagctacttacacagggctgagaatgtcatcccggtgactcatgaagacttgattaagatggtacacaatgcaaggttggtttcacgagccacagcagaccctagagatattctgtgactctcagtatgcacagtggctttctcttacctagtttcctttgctggggtttcacttacctgagatcaagaatggtccaaaagtattaagtggaaaattgcaaaaataaataacccatgaatctgaaataattttattataaatatgttgttataattaccccagttattagctgatactaatatcctactatacctaattgacaaatctaactctgtcacaggtatgtagatacaggaaagcatagtgtgtgtttatgtgtgcaaatgtatgtgcatgtgtctatgaatgagcatgtgtaaatatgtgtgtgtgtgcacctgtgcgattatgtttatgtgtatgcatgtgtgtaggtgtatctgtatctcaaagtatgtctgaatgtgtgagtgtgtatatgtgttgtgtatctgcatgtgtgtgtgaatgtgtatttgtactgtatatctggacgtgtgtatgaatgagtatatgggtatatgagtctctttctgtatatatggcatacaattgtgtattgtttatttgcttatatgtgtatgtatttgtgtctgtatgtgtgtacatgtgtatatttgtgtgtattcgtacatgtatgtctttacatgtgtacctataggtttgtttgtatgtctatgtatttgtatgtatatttgtatgtgcttgtatgccttgtctgtatgcgtgtacacatgtgcctgtatgtgcggtactgtactgtcttcatccaagcactcatctgggttttgaaacctatgccccacagatatggggcacttatttaattgccagaaagttcagaactcaaacactagcaggtttcttaagtatccctgtattccaaaccaccatcgactttttatgatttggtttttgtttattaggtgagtgagtgagaagtgtgtctgtgtgtgtgtgtgtgtgtgtgtgtgtgtgtgtgtgtgtgtgtgtgtgtgtgtgtgaatgccatatgtgtaggggcccatggacaccagaaagggacattggatcttccagagctggggctacaggtagtggtgagctggctgagaactgaccttgagtcctctggaagagcagcaagtgctcttcaaaccccactatcaactctttggaggacagaaatacattattctttgtggtagtcctgggccatctgtggctactggggacttaaattgtggccagtgcattagagaaacaaagttttctcattgtatttcaattaaacagttttaaaccacacgtggctggaggcgtccacagcagatagtgtgcgctcactctggggttttctggggttttctgggttttctggggttgagtgagaacactgaactctgaaggcacatggactgatttggacttcctagttcaatcaatttgccctgtcaactaactcctacctcaactgtcaagcgcattacaaagaattactatccctacctcacagtggctcacacagcccctggaaggcactggtcacacaaggagaacatgcctcctgtgttccctctctctactcaactgtaaaatctagaatttgccttttcatccctatgggatgtagtccatgctagaggaaacaaggactcagaggtcccacccaggaggacccccacagtgggcagagatgatacataaatagtctcacttctctcagatgttctgtgattacaactcttgatgttgatggacaccaagtcaaagatgcttacactttgcttctaggagccatgggcatcttgggaagcagccaaaggcaaagtacagaagcagacaatgtgatggggagctcaggagggtcctgaaacggtttacttggttgctgccttccttcttcccttatgtaagtcccatggaaacccaagcccctagttacctgaagcagcagaggtgggggtagtggccggtggaggctgggcggagctgctggtctcagccatcaggcatgggttgctggcattattctctctcttgacaagcagctcagcggcactgggcagtgggattgggtggctgatgcccagttcctcttcctgggcctgctgtcttctcagggccacctggaagcacagggcagtgagtgaccctccagcatactgagctgcacatttctgctaaactactgtggttctcagcattctgccttctccactgacctgacttcttggtgtgctggcacaagctggagtcaatggaaaggagggagccccaactgaggaaatgtctcaataagactgggctataggccagcccgaggggtatttccttaattagtgattgatgtgggaggcccagtccattgtgaatgggaccactcctgagcaggaagccctgggttctgtaagaaagcaggctgagcaagccctgaggagcaagccagtaagcagaatccctccatggcctctgcatcagctcctgcctccaggtttctgccctgtttgagttcctgtcctgccttccttcaatggtgaatgccaatgtgagagtgtaagccaaataaaccctttcctcctcaagttgctttttggttgtggtgtttcattgcagccatataaaccctaactaagacagtaggtaactaaaatatgctgagctggaaaaaccgaaaaatggactcaataccaagaaaaggctctgatgggttagaaaggagaattagaccgatcactccttcatttgacatggacataaaaggccactgtactgagaatatgaggcagtgaggtcagcttagacgcacgttcctcaccacttaggagaaaatggagggaagcgaacaagcatgcaaagtcaatacaaaaatgtgctagacaccgtgagacatacacagcaagcctacagaaaaaaaaaatccaactaaaatatctttaaaatgtaggtaagtattgtgccagtaatcccaacatatgccagtaatctcagcatttagaaggttgatgcaggaggatcaagagtttgaggcaagtctgggctacacagcaagaccctacctccaaaaagaaacaaaaatgcctttcaagtgtaagcatcccacaaggattctagcagagctgtcaagaaggggtgagcagggtttgtaaatgccaggggaagggcagaacaatctggaagaagcagagtggacaggaaagccagggactgctcagggaccctagaagagccctgtttcccaaggcagagttaaagctaggggagaaggaggctggaatctggtgcttgaagtccctggggtaggagattccggcaggaaggtgaactagaactggagaaagaacccaacatgcatttactgaactctgtgtggtccttattcaacttgtcttttaaataacatttgttaaatttgggtcccaaaaaggcttaaagaaaatgaagcgctctgtttaccacatgtagcaaaaacaaaagactttctctggaaactgaccattgaccatacaacaaaagaaggtaaagtaccaagacctcagaggcctaaagagcaaaggtaaaatcaaaatgctaactcaaaggcacaattccacaggctgggagtgtagctcagtagtacttggttcactggtatttggtactaggctcagtgtatggaacttaaggaaggaaaaaaaaaaaaaaaaaaaccaccctaactgggccagaggcaggactcagtgggtaaatgctcttgtagtcaatctgcagtcccaagttcaagggaagaaggacccaactacacaaaactgtcctctgccctcaacacctgcaccccatgccacaatttttacaatccacaactataatcatcgtaattttaaaactaccatccaaacttaactgatcaatgtggaaattttgctcatagtcaaaggaagctttaactttgaatgggagactttaaataagcttgtcttgtttgttgtggggttgtttggttttttacattattcaagaggcttaaaaacagaacagcaatgacttggacaagaaaccctggaataccccaagtgcacagcttagctatgcaatgagcccatatcttttttcaaaaactttctgttaggaaatgcttattcagacagggaaggaggtagcagctgattaaagatgcaattgttttcaacttatgtttaatatctatttcaaattatttacaagtgagtaaaacccaataattatctgaatttttaagaactgtcttgcacagcaccctattcctggtgtcaaaaatcctcataccccactcattctgtaagaaattttgaattgcttttttgaagtcagcttttaagaacctcaaaattagccccctaaccaaggtgattcaaaattaatgtctcaattagaataaatattttattccttggaggaaactccttccaattatagtcttcacactgaacacagaatccacccatgttttagctacaagcataatttgttttataacctcattgtgatgcctttcaatgtcatgtggagcatattcttttaattcattacagactaagctaaaatgtcttctaagaaactaaaaaaaatatttttaacttcacaatgtgaagccaaagtgtatgtaatttaagacgtatttttaaagatatgatgcccatagtggggtgtaatctttaaggtttgtgcagccctgttcaaccttctcatctgcatcactttcaaaagacattcttaaccaaaagtaagtagttcttctttagcaaacatttctttggtatcttttcattttaaataacctgctttaagatgaaacaacatttggggggaaagaatgtatattattgccttctaaaaatcctttaggctaccgacatttaactatttccgttatgatggtaaattactagcctgctgttcaagctatttaaaaaaaaaaaatctacagagcttcaaactggcatcttccccctgcacctgtaattttttttttcattttttaagcatgagtaaaacatttttaaagtaatctgaactgaccgaacttgggtccggactacaaatttgcattttcagaccgctcaaaatggctgaggcgcttgcctgggtccgccgggcgaacccggaaagtgcgccaacagaggcgcgaacacgctgcgctctcacccccaaggacttttccagaaagccccaggagcagcacattcccgcgccgctagggtgaaagctggtccaggcgccccctttccgcctactggggcagcctcttggggactccaagccaggggccccaggggggatggggctatgggagtccttccagagggccgaacccctcaacttccagcttgaagtcggagttcaaatccggcagtggaacaaaccgcgccagtctgctagccatgcccggatctcaggaagtccgcaccgacgccccaacatccctggtcggatggcgcggtctcggggtcttctaagtcagggaacctagcaactctgctcacagagcacccttagaaaccctggtgcacaagtgcgtggcgaaccccgaaattcagctggagaggggctcaggatggggggaactctgagcagaattccactcggttcccgagggcgagcgtgcgtatctgcgcgcccgaacccggcatcgccccgggagtccacgagattcaaacagagaccccccccccattttttcctggtcagcggggtccccgaccctccaccatcccccacccccggcgtctggaagccgcggccctctcctaacgcgcgcccgccggtagtcccccgagacttcgctgcgcccccgttcccgggaccccgcactcacctgcgcggccatcacgcgctgtcgctcggcaatcaggctgcacttcttgcactggcagtcccgccacatgcagaagcgcttgtggcccttgagcggcgacgcgtaaccgtggttcctgcagcgagcgcacttgggcagcctcggggacttcttgcttccagaacccaggcccgacggcccggagcccgaggcgcctccgctaccccccgcgccggagcccccggccgctcctgccatcgccccggccgctttgctgtagccgccggctttgccctgcggcggagcccccggagcgtgcggggcctccgtcggtgtagagggcttgctgaaagagtcgtcgttaggcatcgagcttcgtctcctgctcgcggatccacccaacaagccgcttagcgccctagaaggagtccaggaggcgggtgcagcgcagaccgacgtgcagtccaaatgaaaagctcgagaagtgggtggggggttgtacctttttttttttttttcttttggcgcgcctcgcgcaggactcttggatacttttcagaaccttccgaggattgcgtgggcgggagagggcgctactcggcgtggccacgcccactgtcccccaactccatccactgcgcttctgtgtgcaagcttgcagcagctgtacgcaagagcgtcgctgcaaaattgctacaaatcatagccgtgtgcagagcaccagcacgagctccctctgagctccttgctccaaggagttgagctgagtggagcccattgctggaggaggtgcagaccaccctgtgtggtctactagctcaccgctagccccagggaggcccgttggatagggggactcgcagccgttttctcccccctccccacccccaccctccagtaagagtgagacgcggggactgaaagtccaagaaaagccggctctatgtttttgtcaaataaagagcctcagtgtatggggctcaagcaccccaaaagttaaagccgggctttttgcccccacctgcctcctacacccctgtttatttgctcgcaggatttctaccacctggctccagtagataaatgtcacaccagctcttttagctctaaccttcattgcttctcaccctaggtggagatagcttctgcctttgaagcagcttcgtttagaacttcgcagacacagggatcttggacatttaaaaacggaatttggccaaagggaatttggcccagcatggtggctcaggccagtcatctcagcacctggaaggctgaggcagaaaaaccaccatgagctcaaggccagtctagaccacataatgagttcctggacatttagagctatagagatcctgtcttaagaaaaatagataaatgaaaaatacaaaccgaatttggggccacatagagtgagccaaatttgtaattcccacaccctggcagaggctataggatccctaagtttgaaatcagcctgggctaagaattcctgcacccaaaattaaaagaaagaaaactcaatctgggaaagtgattatgaaaaactcattccatgcttagatctgctagttttggggttggggtgtgtgtgtgtgtgtgtgtgtgtgtgtgtgtgtgtgtgtgtgtgtatgtgtgtgtggtttttcgaaagcgtttctctgtgtagtcctggctgtcctggaacttgtcatgtagaccaagctggcctcagaaatccacctgcttctgcctcctgagtgctgggattaaaggcatgcatgcgtcaccaccactggcttgcataattaagatctgttattgtatgggaatgtgcaccccaaaaaacaagaaactcccagctccatcatttttggagccttttccaggtttcctgtctgttctctgccagggctgtctgtcttctgtctgcacttgcacagcaaacctgcccctaagatctgctcatcaggtctccacagtcttgtgcctctcacacaccaccaccttaaatctgaatctctagcctagcatgatggctaatatctgttacctcagcaacagggatggcagggggaggtgctgagatgggagaagtgggagttccagtccagcctgagctatatacaaaataaaatccagcaaaatgacagctgggtgtggtggcacaccttgaatctttttaaatgtggattcagtggcaagtaaacctctgagagttcaaggccccctcccccgaacttctccaaaactcttgagtccatgcaggagcctccatctgagctatttctttatcttccagtgtattccacacacacagcaccccgaggccctagcagtggctgggtactgttttctatgtgaaaaaaaaaaaaacacacacacacagaaattgaagaccttggttttctttgcatttcttagcctttaacaccctccagcttggagctctccactgaccctgtacaggtgtctgttacatttctcatttctaggcttgcacttgtactgttaggagactgtcattatattaccctccattcctcttgggtttcaccagtatcaacacttgccttccacataagggctgttttcccaaaggagcacagccagcctacttggcttctcaaggttacccagtggccatgccttttttgtcctcagaaaggagtcctgatacaaccattcacccatcttagaagctcttaagtgatgaccattgttgtcattcagggataagccagtcctgtaaaagtctctcactgaaatatacatgacagccaggcctgatggcacaggcctctaatcccaacttctctgaagactgaagcaggaaggtttcaagttcagggttaacctcagctacagaatgaattcaaagccaactgagcaatttagtgagatctgtcttaaattaaaaagcaaaatgacagctgggtgtggtggcacacaccttgaatcttttttaatgtggagtcagaggcaagtaaacctctgagagttcaaggccataggttctacacagcaagttccaggttatctggggctatataatgagacactgcagcttaatcactaccaaggccctgtccagctttagacattgaaatagatgggagaagacgcatcttctgtgaaaattccagattatgaagaatctttgacagagtgacttaactctacatgacttccatagaaacctacaaattctaagccttgaaacctagaaggctgtgaagaaactaatagcaaatgaagtttttatttgtaaagcacagagaatgggccatgtaggaaaaatccacaaaagcaggggaggtttgggatatacctagtaggagggtgcttgcttagcacaaatgaggctctgggctcaattcccagagcagaaaacaggcctcaagtaagaacagtcctacttgatctatttatttgtgcattaaaaaaaaaaaaaaaactgtttgtggccctgggggtggaacccagggccttgcatgtaccaggcaagtgtactacccactgtgctacctcctcagccctttcttgtattttttttttaattttcaaacagtctcagtaagatgcccacagtgaccttgaactctctctgcagcccaagaaagccttgaatttttgaccctcctgcctcagccttcccaaacctgggattgtaggcctgtacaggaatcccacaggccaaactcttactaatactctgaaaatcctggccttgttgtctcctttctttcccagactaccaaagccccaaagcaatgtcacagatctgtacataatgatgcagagctgtgtccacaacacactgacaagtggggccagttttaaaatgtgcctttaaaagtagctagaacagaaccgagattaaaagggaaaaaaaacttcttactttggaaatattaaaaaatagaacaaaataattgataaattgggcttcaccaaaatttaaaacttttgtgctccaaacactaccatttacagggtgaaacgataagccacagactgaaagaaaatatttagaaatcatgtctggttaacaacttgcatcaggaatatgtaaagaactattttgaatcaataattttaaatggggtgggggtgggggctcagcggcataaagtctgcttagcacactcacacacgcacacatgaacacacatatatgcacaaaataacccagctgaaaaaatgggcacgagcgttgaaccgacatttcaacaatcacagataatactggggacatggataagtgggcaaagttcctgcagtacaaccacaaagacctgagttctgaacactcattctcacataaaagcttgggatgacaacccataactaggacccaagcatgaggaatatggaggcagatcgattgctcagctcactttccagccagtctagcagagacagaaggctctaagttcagtgagagatcttgtctcaaaaaggaagatgaggacaagcaagaaaaatacctgaagtcaacctctgacctgcacatagacatgacaccacacacacagacacacacacacacacacacacacacacacacacacacatacaccccacacacacacaccctaaatggccaataggcacatgcctactaggatatctgtgatttaaaagcacagaagggctggagagatgactcagtggttaagagcactggctgctctgacagaggacctggatttggttcccagcgctcacatgttagctcacatgttggctcacaacgacctgtagtttcagtttcaggagacctaatgccctcttctgacctgcataggcatcaggcacacaggtaatacatatacatacatacacacaaaacactcgtacacataaaattttaaaaacttgaaaataaaaacacagacaaaaagcaggtatagcaacatgtacctgtaaacccaagcactcagggcagcctggggtaaatagtgagtgtaaaaaaattttttttctttaattaaacaactacaaaagagataaacctcagacaacagcagatgtggagaagtttagaactctcagagactgctaacaagaatttaaaatagtatagctgctttgaaatttttaccgtatgacccagaaaaaaaatttaaaaaaacatgaaaatgcatcattattattcatttgaaacaattcaaatgatctataggcaaaattttgctgcaatctacatgaaatattaatttactcagcaatcaaaagagtgacataatgataaatgtcccagcacgagtgagccttaagaacggtactctaactggagcagcaaccacagagcctacatgggtctttgctaggtcctctgcaaatatgtcatggttgttaagttagtgttttcgtgggactcctaacagtgggagtgggggtatctctgactctttcgcctgctcatgggacccttttcctcctacttggttgccttgcccagacctgatacaggggtttgagcctaatcttcttgtaatttgttatgctgtgttcacttaatatccatggaaaatctgctcccagcatgtattgtatgagaaaagaataaaaaagcaaagcaaaacaaacatagtctgggactggttcaatggataaagtccttgcagcgcaagtgtgaggatgagttctggtcccccaaaaccatgtaaatgtcaagcaagcatgacagctcacctgtaataactcctgagggacaggattccaagagacaagttggctagacaagctgaacaagtgatctggggtgaattgagagattctacgtgtgtgtgtgtgtgtgtgtgtgtgtgtgtgtgtgtgtgtgtgtgtattagagaaagattgaggaagagccccagtgccaaccttgggcctctacatcatatccacatgtgtggacacacttatactcatgcacaaaaaaacccccacattattatgagtaaaagagaccagattttacaaaccatttatttataataaatgtccagagcagtaaagcaatacaggaaggaaagtgactagccataactaaggatcatgggtaggaactgatagtgagtgtaaatgtgtataaaatacttttacaaagtgaaagaatggtctaaagtgacagagtttcagaactgtgcaattttactaaaattagaatacaactaaaacaggtaaattttctggtatgtgtatactctattctacctcaagatggcaatttgaaattttgaattaaaagaaactacccgtggtatacatgatggtttaattttcaaaaatttctctgtaaataacaggatcctggataggtctcctattttaacatctggttggttggtttgttgtggagttattccaaggatgacacaccaggcttcctgcatgttgagtacatgctaatcattaagatgaacctaaagttctctgatcttttcttattcctttttaaattttttatttatttttatgtttggctgttttgcttgtatatatagctgtgcaagatgagcctgcagtgcccaaagagaccagaagagggcactgggtcctccgggactggagctactgatggttgtgagtcaccattctgatgctgaaaatcaaacctaggtcctctgcaacagcagtcgatgctcttaactgctgagtcatctccccagcccctcatccttccaatttttttaaacaggaagaatttacttttactctaaggaaaatgtgcatcagtttactggcaaggcagtatatagtgacctaagcaagctacctagttgatgtgtgattcaatcactgtgaaaaggacaaggagataatgacaacttcagatgcctgtaaggaagactaaggtagccaatttttgtggcatatttagaaaaaaatatctgatatatggtaatatacctgttgttatttccattgaaagaaacaaagaaagaacacagaatgtgtgtacatactttcttcccatacatgtgggaagaaactgtgtgaagaggtgctgtatttgaaggcaccgatggcaaatttacctactttccattttgtccaaaacgaactgggttttctccaggtcatggtgtaacaggtcaagggaaaattctccagggttggctctaccatatataccaactgagatactatatgagtgaaaatactccatcaactcaccgtgtcgaatgtgccgctgagtccagtgagctgagcacagaaagtgtgagccatgccccatgagtagggtgagcaaccgaactgaaggcagaaataggccagggaaggctaggcatttagtgagcacttggtatgagatggtagaggtatcccatagtgtcaggggatctgaggaggcatagagagaaaacaggacattctaggtcacaggaacaatggatggaagtgtgggttgggagcaagcccaagggttgggggagagggcacagacatgccagtctggaacagaggagtgctgaagcctagcaagagataagcttgggccgatagcatggcacctagcctgccagtgggcctgttggcgtctatcctctaggcgaatggaggatgatggaggcttttgtccttgagtcgttggagagatgaaagtgagttctgctaatcactgtgtgatttgaacaaaccattcagtgtatttgagttttctggccttaagtggggacaataatatcataggaattagagatgtttgtaaaatgccgagaaagatgcctgccactaagaaatgtttgatcactgtggttaactggtgctggttgtggtcagaatggaggagcagtaggaatttgaaagtggataccgctggcagtgacccttcgtattcaggaagatgattgtgcctggggtagcaggaacaagtcagagtgaccagccgctttctccacacatttgaattcctacaggtgtctgcacaggtggagaacaggcagtcggagcgtcagtgtcataacagtaagagcacaggttccgcagtcacacgtggactgtgttagatgctcactcagctttgccactttctagctaggtgtctccaggatagtcacacaccctcctttccctcatctggagactggaaacacttgggaatcactgtgaagatgcaactgctgatgcctgagcactaacagcaccatctaccaggatgtgggcaggagcataagaggaggtgtttttgtattccacaggggattttgaagcttagaatggtgagctaggaggtaggccggaggatctgacatgtttattacttcttcccaagcagtttttaccaagaagatcaaaaataggaagcctgctaaaggcctggaagcaaatggcaaagtttctagaccaggtagcttactatccttacatgactggagcatccaaggccaatctaaggcccttaagaggacagtgagttcaaaaagggggacccacctatcaaatgcagtacactggctggccagtggggtgagggttccaggaggaggcagcagaaccgcaaaaggagggaagccctgggcactgatcagcagaggccatcattatttcataagaatgcttcataagcagtgcctaggagccatcacccaattaagtctgtttttctccatttaagagtagtgatcacctaagtggtggtggcacacacctttaatcccagcacttgggaggcagagacaggtggatctctgtgagtgagtttgaggccagcctggtctacaaagtgagttctaggacagtcagatatacataacacagagaaagaaagaaagaaagaaagaaagagagagagagagagagagagagagagagagaagaagagtactgaggtcttactaagcatggtggtgaacacctttaatcccatctgttgggaggtaaaggcaggtaggtctttgtgagttccaggccagcctggtctgcataatgagttctaggacaaccagggcaacatagaaagagcctgtctctaaaacaccaaaaattaaaaaagggaatacagtagtagtagtcttgggtttctttttctaatgaaaattaagaggtaagtttttgggtatgtatcagaaaaggttgtcatctagaaaactcaggttaaataaaccaatccatggaaaatgtaatcatagtccacaccaggcaaattaaggattgcattttaaagataattataagattagggagatgacatagtagttaaaggcacttgccgccaaccctaactgagtttgatacctgagaccacgaggtggaaggagaaaaccagatcatgaaaggtgtcctctgaccttcacacatgcaccttggcaggcatgacacacaaataaatgtagtattttttattattattttgaaagataattgtcctggttggctttaactgtcatcttgacccagcctcgagtcattggagagtttcagttgagaaactgactacatcagattgtcctatgacatgttgatgggggattatcttggcttttaactggtacaggaaggctcagcacattgaaggtggtaccattcccaggcaggtaactgtacaaaaagctagttgaatattagctgtcctaactagctagcaaggtccctgcttaacttctgtggttgtgaaatgagttccttggttgggggtaatgctgtgtaaaatagcaatccggcctggctttgagttccagccttgactcccctcggtgatggaccgagacctggagttgtaagctaaaataaaccttttcctaccataaactgcttttggtcaaagtgttttgtgacagcaacagaatggaaactacagcactaactattggtgactttttaacattaagggctgttttgaaacagttggcatagcctaaggaaagagaaaggactggctatcatgttttaatgatggacataccaattcccattagcccaaggaaagagaaaggcttggctactgtgttttctcatagcaccaactgtttgaaactgaaaaagaaaaaaaaaaaaaaggtcttgatttttaagctggtcctggtggtggctcaaacacgctaccagaaaaacctaggtaggaatactacaacagccaggtcaacgtaagttcaaggccagcctaggtaactcagtgagaccctgtcttaaaatgaaaagtaatttatcgtttaagattttccaaatggggggtgtggaaatgtaaatacgagtagtaattaaagaataaaaaatatttttataacatatttataaaagaattaatctgaccatgtgccaataatgtatatgaaaatatgtttatctaaacaaacaacaacaacaacaaaaaagattttccaaatgaggagctgaagagatggctcagcagtgaagagcactgactattcttccaagggttcctgagttcaattcccagcacccacgtggcagcacatgaccataatgggatccaatgccctcttctggtgtgcagacggacatgcaaagtacccacgtacattaaataaataaatctttaaaaaagaaatgactttcaaaataacctggaggtaagatgcaggtcagctgaagtgcttaggtgcatacactttgcgttcaactaaactactgacttctctgcctgctaactgaatgaaaaaagaaacaccaggaaaggacatgactgctcctaggtacggtggaggagaaagtttattgtagataaaagggagagcataggtagaggcgtggagagcgtaggtagaggcgtggacggggacatctgggagagtccaaagtggtcgaccaggttgagctgggccgtgtggggtggggagagagagccaggagaccaaaggaacaaaaggagcaggtaaccaaaacgtctgaattatacagggaagagcctttgggggaagggcagcccagcctctgggctggagaatccaggggagggggaggagtatgccagccttacccagtaacaggtaaggactgagggatgctgggagaacctggaggacaggtccactttgatatgttaaataggcacctcagccttttgtcccggtttagaagttaacactaaggacatagaaacaagacaggttagcaaagctaattctgccagggtaaataatacagtaagcatgcctgtgggtttttttgtttgtttgtttgcttgtttgtttgctggcttgctttgtatttttgtcttgttttaaccatactccactgtcatggggtagagaattgggcacagtaaaatgaatattttcacatagatacccaatattatgtattttaccaagctttttttcttttttcgtccgagaaagccttatcgggtttctactgtaccaactcatgaagaaacacctgtgctgaattttagagatatgttatgaaaacacaagttctgcctatgtgagaaagaatgatgaataaagagccaagtagcagtgatgtgatggcggaagtggtgtttgatgccgagaaatagatcaatggttatgacagttttgacacactactcagaagtcacctgcagctataaaataataataaaaaaatcagtctgttcatctagccagatataatggctcaggccttcaatcccagcacttgggaggtggaggcaggaggatcagacttcaaagttatcctctagtctacatcatatcaggctgaggctagcctgggctacatgagaccctagtccaaaaaaaaagaaaaattagtattcacttacatagttttaaacaaacaaaaacaaaacaaacaaaaaaacctgcttgggttggcaatgtcactgttgttagttgctggaacttaagagtcaaaatattaaaaccaaaccaatatgatagatgttctgggcactgggaaagcaagccaaaagacgaaaggtaaactacttgactatgggaacattcaggaacatttcagttttgggggggtagctgtggcaggattcagggccaggtcaaagtggcagtaagggccagctcatcctctggaggcttcctgaagagtcaggccttcaggagagcagtaatttggattaacaaagaaaactggattattcaagaagctttaaacccagcacttgggaggcagaggcaggtagatctcttgtgagttcctgggcagcttggtttacacagtgggttctaagccaggaaaagctacatagtgagactctgtctccaaaacacaacaaaatgaaacagaaacaaaatgaaaccctgtggaccctacctggggagcctctggaagtgccatgttcccagcaccactagggagtaaaagtcttctgccccctactctaaagcccactgaccctgtgtggtgtggcctgagagctaaggactagtttctcatgtttacatggttaagagaaaaatcaaagacagactggggccacgagaaaatgatacgaaattcaaatttcagggcccacaaatctatcggaacacagactccagtggtttttttgtttcttttctttttggtttttttgagacagggtttctctgtgtaacagagtcctggaagccccgaaacttgctttgtagaccaggctgtcctagtactcatggagatccacctacctctgcctcctgagtgctgggatcaaaggcttgtaacactacaccctgggattaaaggtgtgggccaccaagaccggctccaggtcctattctttactaaccacttgtataactactttgcagacacaaaagcagataccatagggaccagaaatcttaaatattgaatgattttacctaaaaagtgtgtgacaccggctatagaatcccttctacccacacttttttgagactcacaatctgaaatattaaaataaaaatatattgaagggtggtaacacttttagaactaagtaccatgtgttttctagaagacagatttgttctaaaatgacatccctgtctgccttccagacagcctctcaggacccccctggtttaagcatcagattaccaagggagatgggcttgctggcagtgttctagaaaaagggttaggggcaagggcattctgaggaggaaactgttaatgttgccaggaagggatatacagcccagcttcataggcagacctggaaggcaagaactcctatttcagcctagcaggaggatataagggcacagatacagatgatatatatataatatatataatatatatatatatatatatccagaaaggaaaacaaaatgcatgtggccaagcatgagtggcagagcatagccagtgtggggcctggagattgactggaggtaataggactaattaacacagttcccagctttccacgagccagcacacatgctttctaggttgattcatttcattattgtaatagcccataactaggtaggtcctgtcattcattactccactttataaatggggaatctgggatgctccaaagttctgtgacttcccaacctgaaagaagaggagccatagtagctagatccaggctcacatccttaaccatatccaagaaagatgccatttctcatctgttgtccctcactggcagcagaagccgggaggcagtggcactgacctataatcccatcattctggaggctgaatcaagaggatcatgaatgtaggtcatcccagctatagaacaagccctgtctcaaaagacaaacaagaaaaatggtggcaacagaagacaaggagtagaaatagagaagtgagctatgtctcgggtcctgggactatctgacaactggaggaagaatggtgaggacttcgttaggacacttgacacggaggactcttgaagccacaccagacaaaacaacggggcaggcaattaagtgttctgtatagtgcagactataaattccacagcaattagagaagggaggagagggacattctggctcacaggggtcagatgctgctgtcacggggcttctggccttcaagccagtctttggtgatgggaacaggaattataaagtctacaaaaatcttacaaacctcctctgcttggtttaatcctaactatacccccaacatcaaaatcaggaccctgtatacccaagatcttattaatatttgttgaatgtacaggagggttttaaatatatgtgcacgtttgggggcctggagaaaaggctcaatagttaagagcatttattgctgttgtagaggacctgggttccagcagccacaaggtggtttgcagccaaccgtaactccattccagggtgtggtggtttaaataagaatgacccccataggctcatatattagggaatggcactatttgagaaggattagaaggtgtggccttgttagaggaagtatgcccctgaggcgggtgggtttgaggtttcagaagctcgtgccaggctaaggctctctccctgctgcctatgaaccaggatgtggaactcttagctacttctccagcaccatgtcttcgtgtgtaccttcatgcacctcaccatgatggccatggaataactctgaaactgtaagcaagcccccaattaaatgccttcttttatagtagttagcttgattatggtgtctcttcacaacagtagaacagtgactaagacacagggataccatgcctttctctgacctctgcaagcatcaagaagttacagatgcatgaaaaacacacataacatgatcaaatctaatatatatcatatatatcatatgatatatatatgtgtatatatatatatatatgtctttaaacaggtaatacatttgcactattcaaaaattaacgtgatttaaaatgctggagtgaaattcttgtcactgtccttggtcaccaagctcttctctttagattcaggccagtttcacctttttttttttttgagtttttttttttcttcacagttattatgagcatatatgagcagatgcataatgtatgtcaattttttttttttcgagacagggtttctctgtgtagctttggagcctatcctggcactctctctggagacctggctggcctcaaactcacagagatccacctccctctgcctcccgatgtatgtcaaatcttaactctaccgccacaaatacaatttaagatgagttacgacatagcgtgtgtgcagtgtttactgtataaagagagatttccccctaacagtttctaaggatcttcctcttactaatgtctgttctggtttgcatttggtggcactctgcagaggttcctgtactgaacacttggccccttatagaagcattgttcagaagcggggctttggaggaatgattgtattgggagggtctttgtggtggtatattgtttatgatttaataaagccactggatatcagaatgtgaatcaagccacagccctagagtccaggcagtagtgacacacacctttaatcccaggactcaggagacataggcagatggatctctgttagttcaaggccacactgaactacatgaaattgatccagtctagaaaagaaacagctcacacaaaggtgaatctcagtacttgggatcacaggcctttaatcccagcactaggaaagtggagacaggggtgacatggctgggcagagagaggagtataaggtgggaggagaccgaaactgtgaggattgcagtctgaagtttggtggaaagcatcgttctctgaggattcctggagacaggatcacccattttggtctgaggtagaggtaagagctagtggccaactgctttgcttctctgatcttcagcttgaacgccaatatctctgtctgggtttatattattcgtgttacaggttctcatctcataagcagactaatccattgatgggttcataactgtgtgcactgctgggaggatgtggaccacttcacaggcatgccctggaagggtgtgtctgacttctcctctcttgctcatccaccgccatacagttctgccttgactcaggcaaaaaagcaagggagccagttgaccttggactgaagcctcagaaacaacgagccgaaacatttcttttcttaaaattgtttttctcaggtattttgtcactgcgacccgaagctggcatcacacagctgtatccactgtgtgatgtgtctgtcaccttcttcactttccagccttgttcctgtggctgagctcttcatctgctgccagaaataggattacaatgtgtgatacataggagctgagtgaggaggatctaggctagggaagcaaaaggccagaaaagcatggtgatgggtgatgctacctttttcacattagagagatgtccccaccaagtgtgcattgagacaacctttgccagaggtgacccagtccagtgagagatactgcactttggggtcaacaaacttgcattctgttccttataacccactgttgtgagtgacagtcctctgacctaggtgagttcaggggtgccctctttcaaaaggatcatcccagctcgacttgttgactgtttacaccctgtcttggagggctggggagggacacaaggcttgagtacccagccactccctaccacctattgtgttcgtttctgccttaattgcatctggcctcagggagggactagagtataaaggcttggcaagactgcatacaggaggggcgctccatctaaactactgctggcaagcccttattctttctgagtaaagggttttcaggtgcagcttctgtgggaggagcgtccacacaccggtaagtgagccctcacctatgctctgtaaggaagcccaaagaacgcattggttccccagaaggaatttgggcagaatcctgcctcagtcaggaccttaggagaaggggcagttgctgtttatgtctttccatgagaaggaattttagcaatatctgctgttagtatttaggcagctatactggcctgtccttggggctctgacaggatatgccctcagctgcagccactaagagcaccacctgtgcatattcactgtgttcccttttaaaagggccctgcccacctcccatcccccacctctgtcccaccctccccatctccttccttccctccccttcctctttccatctcctccctctctctctcccctctctcctctctctctacatctcttccctctctccctctctctcctctctcctgctgctcctgttggtctccccccttccctttcccctttttctgatccctttccataattaaaaaatcccttctgcttgaacctgtctcatggtgtctttctctggagtgctgcttttcttaaattacaacatgtgcgttcctttggagagccgcagactccttgggcatctctactggagcagtagttgtcctgggctatggagattaagttaaatgagatagtgaatacacatagactgcagaaatacgcagaacacaagagagaattgtccttgttttacctggtggcggtgtcatgctgtgaccctcagagttctttctcatttgtccctttgtggcggaagagggggctcagtgactgctgatagggacagggctctctctgaaatggtttaaaacaaggccagcctcacaacagccagagttctattctcaggacctaccttgtggaaggagagaaccaactcccaaaagttgtcctctaacctctatacatgtgcttgtgacgcatgtgcccacacatgtacatacatgtacacacaatgtttttaaagattatttttatcttatacatatgagtgtttgtctacatgtatgtatgtatgcatgcatgcatgcatgtatgtgtaccacatacgcgtctgatgcccccacaggccagaagaaggcgtcaaatctggagctggagttgcaggtggttgtgagttgccctgtgagtgttgagaattaacccataccctctgcaacaacagcaagcactctgaactgctgagccatctctccagcctccagtgaatttttaaaagttaaaaaagaaaaaactaatgaaaagatttaaaacggatgcggtggcttacccctcaatgtgctgaaactaactgaactgcagactttgagtgtgtgaagctgaggctgtgaattaaacctcgggaaagtggggcatcgaacgctttggtgggaaggtcaggaggaggaggaaggactagaaaaacccagagcagcaggggcaaggctgtgcacaaactgcaggcctggcccagcaccggacttcggagggcttcatctttgtcctggctcagccttcagcaggctgtgaccttgggaaaaccccctcacctctgtgtgctttctttgccttgttgtattagaaaagaaagaaagaaatgaagtgagcagggatgtacctcctggtgacttaagtctacagtttgcctcctgactaggctggaggagggaggagcagaggaaagccagagataggcagccagcagatatttgctaggcctttcccctcccgtttgccctgctctgcatcctgccctccccttgacctctaggtctttgttcagcttccatcaacctggaagtccattcttgcaggacagcctgtgaggcttgaacaaggtcagggtcatgaggagacccagactgtcaagtgttagtccacttccattaattggcagaccttggaaaggaagcagcttgaaaaactgaggggagactcacagtgtactctccaggcatggaggttttttttctattattttctattacctactgataaagagagcattccctcataagggttccatagcatctgttaatatgtggtagtaagctgtactcaactacacgtagtttaattttttattgtggtaaagcatgcctgtttttcttttttaatctttgccattttaagtgaaccgtgcagtgaccttaatctagtaacatggttgtacaactgtcactgccatgcctgtctattcttagtgagacagagcacataagaagtgcagaatcccaaatgttcctctccatggcctcttacatttgcatgttccctgtaactgctccctgcatctcccctgcccttctcatcaattttattttagctatctgcttttgttaaatgtaagcctttgcttcggaggtgggataaaacaaagaacagagcatggtagttttggtttggtttggtttttgcaggagacttaggtgcttttgcagtttgcgtggttagtatctcaatgtttcatccccacaggcttaagtccccatggacttgggcaggaaggcacagtgcagggacaggaacaccacgctctccagaagatttgctgtcttccagtcaatagaatccccttgtcctacaccccagggccacatcacacattgaaacgttatcactggacagtgctcaaaagtctcagcacagatgggacactggtgacagccaaggcttctgctcaacagatcaaaggtgacacatgctacttactccctgcctagagatttgttgagcaagacatccacacctggaccctgtcagtgacttcaggaggtttgcttgctttgtagccagattcaaaatgacactggcccagtttcttgttctgagaagatgaaaacaaggaaactaaaaatgcttggtatttgcttgatttattagtattttcaatatttaagtctgaagtgctaggaggtaaagagaaattataggaacagaatacagcttatcaaacaagaaaggggccagtgaaaggctgccagaggcaaccctgccacaaacttgaagaggtaaaaaaacagaagagtagctttagtcacagagacagggagtaattacacgattctgtccagaaacccaaaagaaatcaaaaccaaataaaaatgcaaaaaatttccacaccaagtgttctaccctctcttcctccctccctccttcctatcctccttctcttcctccgttctcccctcccccaaccccaaccgtctgtcttcttcttttccaactctaacttctctacctgcaaatgggtactgtgtgtttttaacactcatgtgaagtctttggacagctcatgcgtttctaggtgtttttttttttcaccatggtccccctagagcatgcaggaaatagtcaagaatggagacacaggaagaactgggtacacaacccagattctaacaaaggacaatggccaaggcagaagggaaggcaggggtctctaaggagacagtctccttgttcagagggaaatctgctagttctgaggatttacaatgtaggctcctaggagaagaaaggaagaaattccaggggaaatttagtaaactttgtttgtggtggtgttgtgagactgtttctctcactctgtagccaaggctagcctgttaactcactatatagcatagactggctcacacttgaggcagtcaatctgatgcagccccctgagtgctgagattataagcatggaagaaaacaacaaaacaaaaacacttttgggggggggaggtattcgaggcagggtttctctgtgtaacagccctagttggaactagctctgtagaccaggctggtcttgaactcacagagatctgctgcctctgcctcttgagtgctgggataaaaggcaagtgccactacggactggctcctccctaacattgtaaataattttttcttgcatattattttgtgtgaataatattttttacacttgatcttgttttcctttcctctgcatccaattctctcgtcactattttttataattttggttgtgaggctagcctttaatggctgagccatctctccagccctcatcactatttttaaaagatacatttatttttattttatgtgtgtgggtgtttgtctgcatatatacacgtgtaccatgtgtgtgcctgttgcctggaaagaccagaagaaggtttcagatcctttagaccttaaattacaggcagtcaatgagccaccatgtgtgtggtgtactgagacctgaacccaggtcctctgaaatagatccagtactcttaaccacagagccatctctccagcacttttcattaccactttacaatgcagattgaagcaacgttgaaaaaacctgaaattttaaaatttgtattaattatttttagcctagacaaaaatctcctagaccaatacaacaaaccacagttcaaaacaaaacaaacaaaaagcaacaacaaaaaaccaactaaacaaaaaacttcattgatgtataacttacaaatcaaaagaatcatttttcgagtgactctgtctctgtgatccatttcttaaaacatctttatttcttcttaaaatagtaatgaattatgcctaaggcctgagtgtgtattgtatttcccagctataaacatacagttgtctaagaatctcagaaagaaaaaagaatagaaaaaacaattataaggaacatgtattatatacacaatgggaaaatttccagcggttaaaaaaagaatattgaaatcaagtgttggtggcacacacctttaatcccagtactctggaggcaggggtaggggaatctttgcgtgttccaggccagcctggtcttcagagcgagttccaggacaggctccaaagcaatacagagaaccccatcttgaaaaaccaggctggcctcgaactcacagagatccatctgcctctgcctcccaaatgctgggattaaaggcgtgagttactaccactgggccaatattccttttctttttctttttttctttctttttttattttaatggctggaaaattttccgttgtgatttttttaacccattcttgctatataatatccaattctatattgtatttattggtaagcatttgggctccacttctgagtgttacgaatgatgggttaagagtgttcatatgcaagtcaaggcccgtgctttcctttttctcggatagatccctagaagttggactgctagcttctgtgctaattccgtttaattttcaggaaactgccaaagtgtttcccagagtttgcagtgtggggaccacttcttctctcagggtgaagttattgatcagtctgtctgtgcctgtgggcggtgcccaccaaagcgcagagtcatcctgtgtctgcatttgtgctggaaaaggagtccagtgctgctgggaaaacaaaacacagtctgcaaaacccacacaaacggagtcacctagagcaacacagccctgctgctggggcagtcacagaaatgactctacctagccatccctccatgcccagggctacaggttccaggatattgcttccacgaacacacaaatccataggtgctcaaatctttgatgtgaaatgacaagtatctgcttatgacttatgtccatcggtattgcagcccactatttattctaaatcatccctaagagcctaattcaatgtaaatgccatgtaaatagttgtgacattgtgttgtttctggaataaacaacataaataaattaataaggggaattgtcggtcctttttacagacactttttccctttatgcgggagatcaaatccagagccttcagatactaggcaagtgctcttaccattgaattacacctgctgtcctcaaacgcaatttttttatataatttatttatttttattttatgtgcattggtgttttgcctgcatgtttgtctgtgtgagggtctcagatcttgaagttacagacagttgtgagctgccaggtgggtgctgagaattgaacccaggtcctctggaagagcattcagtgctcgtaactgctgagccatctctccactccccttagatgcaatttttaaaaagatttatgtgaagccaggtggtagtggcacacactgttaatcccagcacactgagaggcagagacaggtggatctctgtgagtttgaagccttcctggtctacagagtgagttccaggacaggctctaaagctacaaagaaaccctgcccccccaaaataaacaaaacaaaacaaaacaaaagatttatgtgtgtatgagggtttgcctgaatgtatttatgtacaccataagtgtgcttggtgcctggggaggccaggagaggaactagagttacagatgattgtgagggactatgtaggtgccgagaactgaacttgggtcccctggaagagcagcaagtgctcctaagcacagaaccatttttttttttccagagtccacatgcaagtttttgatcagatatttttaatctgtggttggttgatccctggctgtggaaccagaagacacagcgggccgaccgcacacatgtggtgtcaggaacatagtgaatgaatgtccacaagaggctgtggcgaaggaaaagaggaacagctggtagggtaattaaggagcgccaaagggttgctctgagcaattagctccatgtggagaccgaaggatgagccctaggtactcaggccaagacggtgcagaagaaaccgctgaagggaatggcacacatgctgtatttccttgttactcccaaactcattcatgggtcccggagcagggttctgttgtcccagcatcctcattcagtgatacctggggctttacctgtattttccctgactcgagtaggccggcctcaccatccccacttttaaaatgaagtcatgtcaaagtttaaagaataataaaggagggctgccaacatgattcagttgataaggggctcaccatataaccttggtgtcactgttttattgctgtgaaaagagaccatgaccaagacaactcttacaagagagagcatttggttgggaacctacacgtagtttcagaggtttggtcaattatcgtggtgggaagcatgttgacatggagacagaaagactaccctcagtgacacactttctccaacaaggccttatctcttaacacccttctaatcctttcaaacagtttcactccctggtgactatgttagtctatgagggaacattattgttttttgttttttgtttttttgagacaggatttctctgtgtaatagtcccagctgtccgggaactcactctgtagatcaggctggcctcaaactcactgagatctgcctgcctcgagctcccaagttccgggattaaaggcatgcgccaccaccgcctggctatgcagggacattcttattcaaacaaccacattccactctctcccccatagacttgtagccatatcataatgcaaaaatgcattcagtccaacttcaaaagtccccatagtctatcacagcctcaacattgtttaaaagtccaaaattcaaagtctctccagactcatggcaatccctcaactgtcaccctctgtaaaatcaaaatgaaaaagcagatcacaagtttccaacttacaatgacacaggatatacattaccactctaaaagggagaaaagggagcataacgagggaatattcgaccaaagcaagatctaaaactagcagggcaaactccaaattctgcagctccatgtctgacgttatctctatggagagctccagttccttcagctttgttggttatagcacagttttccctcttgggctcatgccacatccagtctgcaaccttcctcagcaggtatcccacaactctggcaactgtaacatcttggggtctctaacacaatcccagctttaccctcataccttcatgcaatgtccatgtagggacactcttgacacccatctggcctcggcagctttccttagccacaacccctttgctgtatccttaactccaaagccagaaccacagagctgaagctgccaatttctgctgtttgatggagctggaatccggcctcctcttatgattacatttgcatcagctttctgttgttggtggtctccttctctgcctaagcttttctttaattatttgttcacaagttggaagcctagctgggtggggtcttgccctgtggtcaccactctctttattccctttaacctcaagttttgctttcatcaccttgaacaccagacttagttatattacttttcctggtgctctttctctcctcagactgtatattttgtatttctttttgtctaccttgctccttttcattatagatctgcataagagtgaccactatcaaccacacgacatcgtcaaaactaggctgccttgaaatctcctctgccaatgccattaagtcaaaactttttagtttagcctctggcagatttcgggggaagcaagagcaagggcagaaagcagccacattcttctccaaaatatcacaagaactgtctctaggccacacactaatattctgcccctctagcctcttgagacaggcctcttaggcaatgatatcactctcagcaccactatctttcgtgctcctgctagcatggcccagtaagcccccttaaatcatccaaccacttttctagtctaaagtccccaaagtcttccatattcctccaataaacaacttggtcaggcttgtcacagcaataccccactctctggtagcagcttctgtcttagtcactgttcttttgctatgaagtgactccatgacccaggcaactattataagacaaagcatttaattgggggcttgcttgtttcagtttcagaggttagtccattcttatcatgtcagggagcatggcagcacacaggcagatgatggagctggagctgagaactacatcctgatctgatcaaacatagaggggggcacagggcttgacatggggttttaaaacctcaaaacccacactttctccaacaagaccacatctcttaatcctttcaaatagcaccattccctggtgacacagcatccaaatatatgagcctgtaagggacattctcattcaaaccaccacgcccggcagcctgaatcagatcccacatacaagtggaaggagacgttgggcagtggtagtgcatgcctttaattccagcactcaggagccagaagtaggcagatctttgtgagttcaaggccagcctggtctacagagttccaggatagccagggatgttacacagagaaaccctgttttgaaaaaccaaaaataaaagtggaagaagaaaactgactgcacaaagttgtcctctgtcctctgaactccacattcatgtgcatgtgaatgtatacacacacacacacacacacacacacacacacacacacacgcacactcacacacattcacacacacttacacactcacactcacacactcacacttacacactcacactcacacactcatacacattcacacgcttacacactcacatacacactcacactcacatacacactcacactcacacactcacacacactcacacactcacacacaaacacacacactcacacacatatactcacatacactcactcacacaaacacacacacacacactctgtctctgtctctctctgtctctctctcacacacacacacacactcacacaggaacgcacatagacatgcacatgggcatatagttgtttaagtcactcatgtgcacaaggaaacataaagaggtctcaggcactaatggtcttttttcaagctcattggatgaccaggcaaagaactagccatctcaaaaccaatggcattttgaataggacacaggctcctgaaggaagaggcctttcttagctggagatttaactataagtcatcatcataaataaaacttgtttcattagacctgtaataaggttcttgaaggtgcaatgaagtgaggtgcttggtgcagtgcgtgggttttgctgtcagaatttgactaatgtagagttagtgccacagccattgacaacagaacaaatttctatggaaattacttataatactgaattactacaacttaatggccacattttaaaaaagattggctaaatcaaagaacactagcagttctcatcattcatgaaattaaagttagagcctcaaacagagtgggaaaaccgacctatcaatgaaaaacagttaactcactttcttttgttgctagaaatagtttaagtacgttctgcaacaaggcccaaggcagcatttcttctctgtctttacttaccctccttaatccattcagattccttaacaaaccattctgaaatgggtgtttggaataagagatgcctttctctattacggaagctcaggtcctaattagggtgcgggactggccatgttgttgagagcttgattgggggttgctgactcccatcttctatttgtgtcctcatttggagcaatgaagacaggaggactctgtggtgtcctttattaggacacttacctcactgagggtatagcatctgggtctggttcccaatacccatgactatatctctagctctagctctaaaagatccacgtcctcagatacccaaaacacacacatactttctcctctccctccctccctccctctctctctctctctctctctctctctctctctctctctctctctctctctctctctctctccacacacacacacaaacacacacacaaacacacacacacacacactaaaaaaatacaatttgatacaatttgtcaggtaaggtttgatttttgagggctacacatccaagcatctaaacttttggcctttaagaacatttttttttttcagttggaaagatggctcagcagttaagagcacatactgttcttgcagaggacccaaatttgtttcccagcgtatacaccagtctgcagctatctgtaactccaactctgtgtgatctgatgccctcttttggcctccacaggtactgcactcatatacacaaactttcattcagaaatactcacattcacatatacacatactttatgatttgaaaacaaacaaacaaaaagcttgggcaggcaccatacccagcaggagacagtcaacacaaaacaaacccaaaggtatttgtggggattttttttcccctctcatattgctttgtttaggcttcttttgttgttgctgtcctggaactcactctgtataccagactgacctcatactcagagattcccctgcatctgcttcccaaatgttgggattaaaggtgtgtgctcccagcacccagctcaccttactggtctttgcttgtatattgtgattttcaattttgagtttttatggcttttggttgtgtgtttctcatgcttttccttagggtgttatttttgcttgtttaatttgttttatccttatttgtcttttttatttgcttgttttcttaagagagaatgaaggtgtggatttggaaggatggggaggtggggaggatctgtgaggagatgagggagaggaagccgtgatcagaatatagtgagtgaaagtaactttatttacaatcaaaattaaaataaatggatttaaaagctaaaggcctttaatctcagcagcactggaaaggaagaggcggacagctctctgtgagttccaagtcagcctggtctgcgtaagttccaggatagccaaggttacatagggagaccctgtctccaaagaccaaaagaaagaagaaagaaaaaacctatcttaatgtacaattactatttcgtgaatgtcaggcttgttgaccatcactgctgtgctcatcaactccttagaaatctctcaatagatctcaatagatagatctatgctatgtctaaaccatctgaaaatcattgtaacctaaaagaaagaaaataccgtgtgcctcttgtgtaacaatcgttcatttggctttaacaatagaactgtgagattgtatgatcacttctacccacagatgaaaaaaaaaaaaaaaacaaaaaaagaacaaaaaactgcttaagggaaacgtgtccagcgtctgaatcccaggttccatggcttaacaacccctgactccccaccccacccccccacgcctgccccctgccttccaggaactgattgctcagagtcttcagtgacctcagaggggaaggacttcaactcaaccctggatagagccaatgctcatcgacacttgctttgttacagcaaacatctggctgcagtgtctgcttacactcctgaacaactcagtgaagcacagtctagtggtgttcacttttcatacccagaggctctgggaggctaagtgctccaactcccaagattcttttagattttaaaatttgtatttgtgtgtgtgtgtgtgtgtgtgtgtgtgtgtgtgttccacaagtatgtatgtgttaaatgcgtgccctgtggctgaggaggtcagaggagggtgtgtcagattcctctggaattggagttatgggtggttgtaagctaccatgcgagtgctgggaaccaaacccaagtcttctgcaagagcagcaagtgctcttgatcattgagccatctcccagccccaggcttcagcttctaaatagcaggatggtaacatcaagtcatctctgtccccaagattttgcccattgcatccactgcagagtttagcttattccaatgtccttagtgtctgtccaaagtgtgtctttgggaatatcttctctctcattcccattcttcccagcccatagtggaacatggacagaaatcttattaaagggcgattctcagagatctgagaagggttaaggggatctattgtggggtggaagtactgtgaatctgatggcacaaggaccattagcctctattcctaaagggacacgggaaggaacaatgatggaatccggaggtactggcccctggcagagacaatggattcagcagagacctgcaacctctggccacccagcagggagaaaaccagaggaagaaatctccccttctcctgccaatcttcttgccttcttcacccatgagagcatcttccatggcccatgcccaagctgagacaaagcacgaaggggcttgtcccagttgtccctggaggccaggctcccagaacatggaacacagtagagaaaacaggacaggaacctgaggaacagtgccacaacccggcacagtggcccaaggacaatgccttagttacttttctgttgctgtgataaaatgccatggctaaggaagcttagggatagaagggttcatttgggcttataggtccaaaggactaggagcccatcaccttcgctgagggagacatagcaggcaggcaatgcaactgagcagaagctgagagagatcacatcttgaacctcaaacatgaaagagagggagcacactgggactgacaccgctattaaattctcaatgcctgcctccagcaacaccttttctctaaagaggtccaaacagcaccaccaactggtgaccgagtattcaaatgcctgagagtaagaaggacatgttatctcattcaatccatcacaacccgtgtggtaaatgatacctcagttttcactgaatggatgagaagataacaaaagacttgggccttgaagctacactgcctggttgaagactggcccatggcttcctaccttggtggctttgggccagtaagaagctgtcttagttactgttctattgtcataaagatacaccatgaccaaggcaactgatgaaaacatttgagtgaggtcttgcttacagtttcagagggtgggtccatgaacatcagagcaagaattatggcagcaggcaggcatggtgctgaagcaggaactgagagctcagatcctgatccaccaacagcaggcataggaaggctgagcaaagagagcaatgagcctggcagcggcttttaagacctcaaagcctaccctcagcgacatacaggaaggtcatatctcctaatccttcccgaaatagttctaccaactagggaccaggcattcaaatatatgtgcctacaggagccattctcaatcaagtcaccagtttcctcattttgtaccacggagatgagagcgtccgttcagaggatggtcagaaaactcagatatttacattacaattcataacagtagcaaaattacaatcgtgcagtagcaacgaaaataattttatggttgggggtcaccaccacaagaggaaccatattaaagggtcgcagcattaggaaggttgggaaccactggcttaatgggtaaagacacttgctgtcaaacttgacatcccaagttcaattccttggacccacatgttggaaagagagaactgaatgtcccaaattgtcctctgacctctacatgtgcacacacacacaaatgtaataaataccgttttaaaatacctctgccattcaaatgcactattttttcttttgtgtacctacataatttctagtgagaattcgtggagtccacacacttctacagctacccactgtttgcggatgtaagttagtcacgtgaccaacatactactggtagattagccagcgatcttatttggtttctgttggctgaggttgtccctgtcgaaaccatggcaagcttgtcttgtcataacgaaacatcttccctggaagagacttcagtgtttctcaggtaccaactcatgcatctaagtccattggttctcactacagaacaacacaaagtcacttagcaacagtgactcaggcctctggagcctaggaaatccaagaccacgatagtggtcagctatatggcctatgtcctgctgtgtcctttcatggcacagaagcagagagataactcacttcccacaccccttcctaaggactgcaatcccatccagaggcctgccctctgctgtcagcctggtgactgagttccaacacacacacactggggacatatttaaaccacagcactgtggcacttaccaagtgttgcttcatcctgaagtgaacccacctaaactcaactctcattacttcctttccctaaagataggctgactgaatgacttaatatgatcagtttctctttgaagtcaatctaaaatttcaaaaagtggctacaagaatgtcttctttgggaagttatggggctatattactatgggagctaattatgaatttatcacagtttggagcatgcccccaggactgtttctctcctctcatgttcgtgtgaatatttttgaaggtgttgttaaaacatgaacaacatctgcctccccaccctccacccccatcccagtgacaaattgagacaggattctatcaaagttcactctggggaaccaatgatttattgggcttatttacagagcataggtaaggggttacctatgggagggtgctctttcctaaaaggccacatcagaaagtgtttccccagcaggggtgagggatttcccatagccacatagatggggtcacctccactcatccttctcaaacatatatcctctagtctttcccagagactccgaggtcatgtgcaattagcgcagaactgcttgcaattggttgggaggggttggggggggcaggatactcaggtgagggctccctaacactccctgctccctctaagagggagtgaccacagtcagcaagcccagcagggatggtctttggtgagtaggctctgctagactcctgaagatggcaacagtttgtctcagaggatagtcctgtacaacaaaaggttaacaatttcttttgtttctttttcattatataagagaacaattgtgttgggcgatggtggcacatgcctttaatcccagcactccagaggcagaggcaggtggatctctggatctctgtgagttcaaggcctggtctacagagctagttccaggacagctagggctgttacacagagaaaccctgtctcaaaaaacaaaacaaaacaaaacaagacaaaacaaaacgaaatgaaacaaaaacaaaaacacagagagagaaattgtgtggaaagcataaaaatacaggtggggatcttgcttatctgatagagtgcttgtctagcaagcatgaagccctgggcttatcaccagcactacttaaatcaaccatggtagcattcacctatgaccccatcactctggagataaagacatgaggataagctcttactgttcttactgctcttgctctttctgctctttccggctcttctccctctccgctctcctctctttctgctcctgtctccctcatctcttctgtcttccctctgtgtcttttttacctcttttctcttttctccccctccctcccctttctaataaaacttctcactcaaaaaaaaaaaaaaaaaagacatgaggataagaagttcaaggtcatccttgactacatagcaagtttgaggccagcctgggatacgagaagccctgcctcaaaacaacaaagaaagaaagcatacaaatataaaaggaagaactgagttgggtggtggtggctcacacctttgatcccagcatttggaagtcagaagcagatggatctctgtgagtttgagacctgcctggtctacagagtgagttccaggacagctagagaaacccagagaaaccctgtcatgaaaaaaaaaaaaaaaaaaaaaagacagaaatcttagctccagtgtctttgtagaaagcaactgggttcattgcctgcccttttctgtttcctattttttttttctcactaagtaatttgtcctggacttgagctcactgtatagcctaaataggcttcaaattctaaatctatccttctgtcttactcttccatctctttttatacttctcctgcacgaaaccctggttactcttttttttttttaattagacttattcattttatgtgtgggtattttatcttcatgtatgtatgcatatcatgtgcatgcttcatgcccaagggagtcagaggagaacattagatcccctggaactgaagttacagaccattgtgagaattcatgtgggtgctgggaattgaatccaggtcctcttcaagagcaacaggtgctctttaaccactgagccgtctctccagcctgcctgctttcctgtttgtttgcttgtggattttattttttttgtttgtttcttgtttttcaagacagggtttttgtgtagccctgactatcttgaactcacagaaatccccctgcctctgcctctgcctctcaagtgctgggattgaaggtgtgtgccatcactgcccaactccttttggttatccttaaaaagctaggatcaggactgctctgtcacacgggcagaaagaacagcattctgagaatctgcattgggcattaacaaccaaagacaccaagcaaggctttgttaaagccaggagagcagttctgggcctggtgaggtggctctgtgggtgaagcccctgtcacatgcttcaggacagatttccataaccccagaaagttggatacagcattatgcatctatcatcccagtgttcctatggaagattgccattaaagacaggagaatcctctgaggctcttgatgctgctagtctggcacactgggtgggaaaaacaaaatctgtctcaaacaaggcaaaggcaaggactgacacctacagttgtccactgaccttaatacatggaccatggcacatatgtatctatatttatacacatgaatgggcattctctctctctctctctctctctctctctctctctctctctctctctctctctctctccccctccctctctctctcacacacacacactaacgtttgtgcatctgcccatattcagttaggtgatcacaataatgctgctagatggctgaattttgtgtgcctgtgaataattgctctctgaagcaatttcgatggggaacttagtttgtgagctgtaaaaataacactgttttacatgtatacataaacatcacaccctgcaagaaagcttgtcttttgccttcagaatgaccttggcatgtatggcagatttgagttggttatttctaactatggtcatttaaggatacagcgcccacaaaagctgtgccaaagaacctgggggtggagaggagtgcgtctttggggaaccagaattacttaggtatttaggattaccctgaagaactgtatacacatggaggctgcagaagtaggtctgtttgtctacaaagctgccagtgccaatttaaagagagagagagagagagagagagagagagagagagagagagagatgtgtgtgatgtgcagccacatgcctgccacagcatgtagaggtcagagacctcaggcatcagcccacaccttgtttgagatgagggtctctcttggttgttgtatgtggtcagttagctggaacatgagctctgtgcttcccacctcaccacaggtgtactgctatgacagatacttgctgctgtgcccagctagtacatggctttggagatttgaacttaggtctttaagcttgcatggcaaacactttacccacagtggcatctccacagccccagcatcttattttttggataggctgattttaagctcaaaaaactttaggtttttgttttattttttaataaactaacctctgctctttgggcttagatttttaatactagaaaagactttaagatcatcttagctttttttttttttttcaaggcaggctttctctggagccttggcagtctgactgaactggaattcactctgtagatcaggctgacttcgaactcagagatctgactgccgctgccccccaccccacccccagtgcagggattaaaggtgtatgccacaagacaccagctctagatccttaatttttataaataagagagcataatgcagtaaatggcacacccaaggttatttgatttgtatttagatttaaaaaaatccaatattatttctttcatttaaaaaacagctttatatttatgggatgtggttaaaggaccctgcctccatttgcatttgtcgaggctagaccctgtcctttcctaggcttccatgtagtagagtgcattatagtcattttgaattttgtttcttttcttccctgagtggtatacctttaaatttggggggagggtcatagtagctaaagcagggctgagtcacttttcctcttataatccctttttgccacagaaaagtatatgtgactttgatcatacatagatacataaaatagaatataccaaacatttgctgatagtaaatcagaaaaaaatattttaaaacaactcttaagtacatgttatagcatgatgtaattttaccattcgttagaggcaaaagcagagctggggaaatggcgaagcacttaagagagagttcttctcttccagaggacttgagttttgcccacagccactcagaactccagctactggggacctgatgccctctgctgacctctgcagacacctgaacaggtggcatacacttaaatgaacacattcacaaaaaaataaatcacttttaaaaactaaaaataatgacaaagcagatttacatagcaataagattcatgcatatttatttatttgtttgtttgtttattggttcttcaagacagggtttctctgtatagccttgactgtcctggaactcactctgtagacgaagctggcctcgaactcagagatttgcctgcctctgtctcccaagtgctgggattaaaagcatgtgccaccactggagggcttcatgcatttatttctacacaaagcattaaatcttggatggatatttaggactagagaatgaaaaggcccttccataagtatgtagtacagaaagaagttttttttttctttctttctttcttttcttttttttttttttttggtgttttccagacagggtttctctgtggctttggagactgtcctggaactagctcttgtagaccaggctggtctcgaactctcagacatctgcctgtctctgcctcctgagtgctgggattaaaggcgtgcgccatcaacgcccggctgaaagaagtatttttaaggaccatttatgaaactgttggaaattctgtactaccttctaagccaaaataagccaaaattcatttaacaatttattaatgaaacagtaagtttttaaattattttatatgtatgtatgtctgtgtcttcagcggccagaagagggcaccagatcccatggggctggagttagagttgtgagctacaatatatgttgggagtcgagcctggttcctttggaaaagcagtcagtgatcctaaccgccacgccatctctccagcctctcaaacagcaaattttaaaatcatttttaagacagttcaatgcatagataagagtaatttgatggttacatgctgaggggctgctggtaggaatatatgaaaagctttgttttccaaaaccatgtacctgtcttagttacttttctattgatgtgaagagacacacaaccaaggcaacttacagaagaaagcttatttgaagtttgcccacagtttccgagggtcagtccatgaccgtcatgttgggaagcatggcagcggagcagtagctgaggcctcactgagggctcacatcccgagacacaaacacaaggcagagagagctaacaggcaatggcatggccttttcaaacctcaaagcccatcctcagtaacacaccttgaccaacaaggccacacctcctagaccttcagaaatagtttcaccaacctgggaccaagtattcaaatatgagtctatggggccattctcattcaaatcacagttcctataagagcagaaatctttgtacgtcagcaatgacaccatgaatatgactgctctgtagactaatgaactacactagccttgagtcccagctcaggagtgtcagacagccttcactggcattgtgctgagtggctgcatattcagtgcaaaatgtcccttgtgttcagaaccaaggctgcagtgaggtgtgtaaaacaacaggcctgagagcttccagagacaccttggattcattgcatacttgattttgagtcaattttcagttgttttacatttagaaacctgttatgttgtccaatttctcatacccatcccccattctgtcatcccacctacagtctgataatttgtgatccagttagtgaattaggactaatcatgccttgtgcacttggaaaatatgggagaatccttgtgcatcccacaaatatacagtatgtgcagcaaagcaaatgtttgcactggatctgagtaccacaaactgccaaagttcagattacaaagttgtcttagttatggttactattggccgtgatgaaacaccatgaccaaaagcaacttggaaagaaagggtttatttgtcttacatatccagcccattgagggaaaccaaggcaggaactcaaacagggcaggaacctgaaagcaggagttaatgcagaggccatgaaggtgtgctgtttcctgacttgttccttatggcttgctcagcctgctttcttgtagaacccaggactaccaacccagggatggccctagtcactatgggcttgatcctcccctatcaatcatggattaaggaaatgccctgcaggcttgcctacaaacagaccttatggaggcattttctttttctttttctttttttttttatctttttaacgattttattcatttattatgtgtacggtgttctccctgcatgctggaagagggtaccagatctcattacagagttgtgagctaccatgtggttgctgggaactgaactcaggacctctgggagagcaaccaatgctctcaacctctgagccatctctccagcctggaggtattttctcaattgatgctccctcctctccttctgtgctatccagcacagaagtcaactcattaaggcccatgtactttctgggggcctccaatgtgtagccttctccaactgtggcatgttctagagaaaccttgctatacccttgtatgtggttaaagggccccgcctccatttgcatttgttgaggctagaccctgtcctttcctaggcttccacgtagtacagtgcattatagtcattttgaattttgtttcttttcttccctgagtgctatactttaaatttgggggggaagggtaggtcatagtccctttcagttgtaaattttcctctccaaagttgtagcttcctttcactgtccccgaacaccaggctaaacaaatgtgattggcaaatgggaccttcttgctttctttggcttgttcacatcaggagagaggacagcacagctttgaaggggcagttgggttgactttgttaagtgggcataaccagccttctctcccaaaggtacaacaaggaggtgaccctttggggccacctcaacggtgaggtttcactcatcagtaagagtacaaaatctcaatacggaatcaatgccaggctaacctttcaaagcctttgtgctattaaaggctatttccctgagctggcaggtgaaattatggcttgaagatgaaaacacggagggcagcaaatgaaagaattagtgccctgttcaaattagattttccatccaagcagggaaacctttgcctgttggggctgctgagggcaccttcaggggtctacagccaaggacaggctgagcagcagcagcacattcttgccgtgtttcaccaggggctctcacctacacctgtttccaaatctatccaagccgggaagagccaggaaagcacaggtccatggggccattgtgtttcaagtgtcttcgtggttcttgttaattttcttggtgtggatctggtcagagtctggtttgtcaggaaacctgggattttgttttttaggatgcttctgctttttattttattgggcattttttaaaatgttcaataactatatatgggtattttgcctacatgtatgtcagaacaccgcatacatgactggtgtccatggaggtcaaaagaagggtctttgctgttttaaatagcaaggaaatggccaagaattacccctcaaaaagcaaggcatctaaaaaatagctatatcatgctgcttccagtggcctttgaagggggaaataatggaatcggtgactgagcgctaagccactctgcatgactcattaaactgccattttcagcactttgcctcgtactgtacaaatgatagaaccctattacaatctatgctaagtttagatgcttttctatctgaaaagccttgtggtcccagcactcagccgtgagtatagacatcatttgaaacacagatagtcataatagagctaaatttgataaggcactcaggcgtgagccagcagcccagccccttaaattgggctgcacgattaattgctactcttttatttattatcttttatctctcattggatacagttgagttgctacttcctgggatgaggccaaggcaaaggatgggaatgaataatttttaaattatgaagcaatttctttgttacaagcctgggctcagatgtaaaccttaatcatttccttttcccaggacagtgccctttgaactcaaaaagacatttggctttctatcctccagccagggtgagcaggtcagacatgtctagtccttggaggtctctgatatttttcttgccctcaccgaggaagtggcctccttgaccagtggcttctcatgacccaaagtttccttaaagacgtccctgttactaatcagtaaatgccacagcctgctgcactttgacactgacaggcttgctcacccgtgtgcctttcacccaagtcttgtccgaggaggtaaggactttctcttcaagttgtctgtgactttgagtagagctggactgagtgaatcaacaggcttggattccagagccaccagatttccttcctgctattcaacagcttcctccattgtccaggtgttgcaaaaaaaccaaaaaacaaaaaacaaaaaaaaccccaaaacaaaaaagcaaacaaaaacaaaaacaacaacaaacaaaacaaaacaaaaaaaaccccactcttgggaattatttctttttttttccccccagagctgaggagcgaacccaaggccatacacttgctaggcaagagctctaccactgagctgaatccccaaccctcttgggaattatttcatcctttgcctttcttcctagtgagggacattaagagtttgtggccagcaaaaatgccatcgacttcagtagggagacactgtaaccacgattcctaagggctggctacaggtgtgcgtgaccacgcccgtcagggtatggtcaaggtgatgtcaggatgacgtggtaaaggtgtaaagagatagggaatgcacatggtagtgctcttttctctctgctgcttcggctcactctggattcctgtcagttggcgtttacttattaaagatatcttgaccattacaggctacatattagttatccaccgtaatagacttctgcagtaggtcccgagtaacctcaagggatcctgtcctgagaagaggctgagtgtggcagtacaaagggtgagcagagggagagcaacaggctggggaggggttcaggctggagtgaccctgaccctgaccaccgctgctgaccgctccactggaggccgcattggcatactggacaaaagactggctaatgttccaacgtgcataagtctgaagatgccttgttattaaaaagtaagtttcctacctatgaaagcaattgatcttcttgtaggaaacctcttaaaatatgttttaaaaaatggaaacaaaagtctagtcttatagttcagaaacagctaatactttctcatggttgcataatatcagatcacttatttaatcagtgacccattgtttttgttgatagaaatgatgagcctcagcttggaggctgaggcaggaggatcataaatttcaggcctgtctgggctatatgatgacatcagagccagcgtggaagacttaaggagaccctgttgtaaaataaaaataaagtggtgagaaaagtctagagatatagttgtgtggcagaaggctcacctagcatttgcaaggctctaggatcatttcctagaaccagaaaagaaagagaggggagagaaaagggggaaagggcgggaggagagaaaaaaataacacttgccaatatttacagaatttcctagggctcctaagtgcctaccagccagctcattgcatcagctgggcagccaatgaagaggcacaggtgtcatcctcattgtagtgattggaactaagaagaaacttatccaaatccatagccagtaaagaccgatcggatttaagcttcaaacctggcagttggcctcctgaatctgcctctgaatgagtctgatcatttctcaggctgtattgcctaggataccatctctgggtccactgttcaataacatacttaaggcaacaaactcaggtgttctttgcttttttgatggatgcttaagacaaagcacctgtctcggactagagcgtttcgtctcccatttctgagttggcagcagaagaatctaccagggaaacaggctagtccactcgagaaacagaaatccttgatttacagtcgagacttcttagagaacttttgaatcagaggcactctggtcctcagtggcaccacagggcgaagactccattactgcttcctcccagctctgtcttcacggtattaactggagaggctccagggagtggaaaaggaaccagactgtaatccaagctaggaatcctgtagttgactgtgtttattagttgtgtcggaagtgcatgcctggctagtgtgtggaggtcagaggacaacttgagggtgttggttctctccttccttctaccatgctggtcccagggtttgaccttcagtttgggcagcaagtgcctttagctgctgagcaatcccttcggccctgtttatttgttgttggtaggaaggctttgaattatttatctaggagattggtttaactgaagcatgggctattccttcaatgcaacactgaaagaggtatgtcgacatatctgacctggaaatgaggctcttttaagcagaaacaaatttcagagctgagtcatcgtatgaagcatttcagaggatgtgtagacaccatctcctctaaagaaagtgttgggccaggaccaggatggcccagtggttaaggcgttggacttaggatccaatagacatatgtctgcgtacgttcgaaccccactcctggtataagtgctacttttgttctttgccgggcgttggtggtgcatgcctttaatcccagcactcgggagacagaggcaggtggatctctgtgagttcgagacccgcctggtctacaagcgctagttccaggacagcctccaaagccacagacaaaccctgtctcgaaaaaccgaaaaaaaaaaaaaaaaagtgttggtacctggaggtggtggtgcatgtctttaattcccagcactctggaggcagaggctggaggatctctgtgagttccaggccagcttggtctccagagcgaattccaggacaggctccaaaactatacagagagccctgtcttcaaaaacaaaaacaaacaaacaaacaaaagtattggtgagagaatagggctgctttgtgcatatttatattacttgaaattctggtaaaaagattgccattgtttaactgtgacatttcccttgccaaaactgaggttgagaagtctggttatcaatgtaaaggttttgagaggtggtggtggtgtctttaagaggcagttaggtcttgagggcttcaccctggggaacacatggatttagcaatgcttttcaagaccacctggcacctctcacaccaaactctgtccactcccagctcttccactggcttcttcccacaccatcatgtggcaaggcaacacaagacccctgacagctgcaaccaccccttctggaacttttcagcctgccaaaatgtaagtcaagttttatttctttctaactaacctgctttggatactgctatagcaacaggactcagactgtggtggcttgaatgagatgcatccccccccccttttggtgactgggaaggatttagaggtatggccatattggagaggtgtgttactagggcctgcttaaagtttcaaaggcctcccaccatcaacagtgtgctctctctgcttcttgttgtttgtggtcttggatgtatgctctcatctgttccagcaccatgcctgcctgcctgcctgcctgcctgcctgcctgtctaacatgctcctggcaataaacatggtcatagtgtttttatcacagcaatagaaaagtaactaattcatagatcaaaaagtaaccaatagctgcgggttggtggccatgcctttaatcccagcactcgggaggcagaggcagaggcagatctctgtgagttccaggctagtctggtctccagagtgagtgccaagataggctccaaaactacacagagaaaccctgtctcgaaaaaccaaaataaataaataaataaataaataaataaataaataaataaaaagtagccaatagagatatttcaggaagctagaatactcggagtacaaaaccttaaaatatataaagacaaactcttatttacatatggagaaaatagcgctgaaaaccaaacctcagaggatatagaacactaccaactgacctggtatggggaaaatagaaacatatttcccccctgtgttttctgggtgtttagagttgtagctgtataactactgtacactattgtcatacatacatattgatgaaatgacagagcataaagtcctatgaaaagaaagatctgtccctctctgctctttggctgtaggcacattgtgaccagcccttgctggccctgctccctcccctgttgtcatgccttactcaccttgatggatggtacccttaaacctcagaggattccagataaggagcatctatacttatgtctgcaattcagggagagaactcaggagttgttggctggcctctgcagggagttaatccaatgagacagacaaccatgaaggaacactgtgaggctgagactcccacagacagccgagccaaagctccagccttcactacctgcacttccaaaagaagtgcttggcctaggtctcagcctctagagagggctcagcaggagagcacgagaggtaaatgctcaggatacaggagtgcaactgtttctagaattctagaacctggggactgctctgccagccagaggaaggatcttctcagttgacattgttgagttgctttacccagagaattcatggttaaggtgttcatggtgatagcacccttggttgtccaaggcctctggttggttttgcagaaacatgagtaataacaacagcaacggcattgtactcgccagcacttgtatgtaactctggtcctctgatcctgtttcccatccttcctgctgctgtcaaggtgttgctctacctccaccccaactcatgtttaccgattacactgaggcaaaatccctgttaccaacacctttcatcttggactcctacagtagtacaaactagcatcttctcttccactggagtcctggctactgtttattatgtcctcctggatatgctgagtgacagatgagttactcaatgcctccatataagtagttaagtctcaagaaggaaatacctgctgggtggtggcacatgcctgtaacccagccttgggaggcagaggcaggtggatctctgtgagtttaaggtcagcctggtctacagaacaagttccaggacagctagggctacagatagaaaccctgtcttgaaaaagcaaacaaaaaagaaagaaaagaaaatacttccttcatatcacattcaaaatcatttttatcatcgacaattatttttttttgagacagggtttaactgtctatcagttccctagctgtcttggaactcactttgtagacctctatctcacagagatctgcctgcctctgcctcctgagtgccaggactgaagacatccgaaatcactacccagcttatcattgacaattttaagcataaattttcataatcaaattcccttcaaaatacttaaatttttatcattgcaatgagaccatccccatatttgagtatcccagagtggctaataacccacaatatgtttacttagccctagaataaatcctaaaagttgtttgtattactgattacatctcttgatttaaatttcttgaatacttggaaaacaggttagaattaagtgctcagaggccattctctgtggatattatcaagcctttaaagcggcatgtgaacatatatgtttctctgcaatgagtctacgaactgtgtgcagccaacagaggctgagtctgccaggctatgatcatggttcatgctctaggacacacagaactgttacaggagacagcctcaccctgcaggagacatggttacttttgtcagtatgacagttgcgtacattaaaaggtgctgatgtccattaaatatgccaagaggagattaatagatgcaaaaaaaacccctaaaagactgacaaatgttggagtagactaggagatatctcttatttaatatctatatttcatgtctttaaagttgtaattgcttcccccctgtttcttataatataaaaccctttaatacacctaccttataaaagttctatggccatatttaatttaacatcagtttcaagggactatagttttgggtcattttcattcatttttatcttgcaagcttaggctttgtaaacaagtcctgaactgcaaaaagaattccatgtttactggatggcagatcttagatggaaaagatttttgtcttagtttaaagatattgattttagaatttagttgttgtaggctgggaccttcagtacatgccagagatgcagaaggtgtgagggatactggcattcataaacactgcagtgtgtgacgtcaggtgaatccaggttccatgtctccatctaatgagaccaacagaggagacacaggtttactttttcccagggctaaagatcatttccccttgcatgggaattcttgggtagtgcatttgtccgtgcatgcctgctctttcattcctatttcatcacattatttgaaggcttaaaatgtgttacagtgaggaggggcacctcctggcaaaattgctgccgccctctactgtagattttctgagtagcagtaacacagtatctcaagcattgaacatggtaggtgcagggctctagagcaaactgggagtgaactttgtgattacaggtgtgccggttaaaagacacctgtgtgtctgatggtgtcgtccaccatgcaacagcctgtcctgcctactctcatttgctattgggaccatccttgggctttctcaagcttagaggagtttgccacaacatatatcacttggcttggtaaacgcctaagcttgtccctggttgaataattagtcacttgaacctgatgacctttatataatggtttgaactcttgtgaaaaaagaaagtttcagaaaatgttcagggaaaaggaaataaaccatatttatgatgtaatgaactgggaaataggggaaaggaaataaatcatatttatgatgtaatgaactaggaaatgggaagtaaattcctactatagtagaaagaaggaaaacctgggcatggggacctacacctttaatcccaacactcaagaggcagaggcaggtgagtctctgtttgaggccagcctggtctacattgtgagttctagtaaagccctctctcaactcctcaccaccaacccacccacccaaggaaggaaagggagggaggagggagggagagagggaaggaggacccttaagcctttagagacagtacaagttatatggattggaacaccagggtcctccaaggctttaactgtgtgaacttgatttctctgttcatcctggggggtttccatcccaaaccacccatgaagatcatggggtgaccttgtaaatatcaccagccacccagccccacagatggggagtgggtgtcacacctgggactgctccccaggagatttcagtgtttgcaggagggtgaaaacactacaccagtctgagctatggggtgcaagagtgtcccaccccctcttagtgagcagggacccccactctcaacagggccagcagtgattagtgtcattaaataaggaaatctagttcttcatgcagctcttagagaaggtaagctttaaggaccactggaccaagcacccgccttggctttgaaaagcggttgctctttgttcataataaccactttccttggggatttccctggcatttgggtgtaaagagtatgcatttttaaagctgtccaaatgcctatttgtgcaggggaccataactcctctccgtaggcctctatgctttatcaagtaaatgatacacatctaaaaacctatctggagagacatttacctgaggagctgtgtgtgtgtgtgtgtgtgtgtgtgtgtgtgtgtattgctcactggctaaataaaaatcttctaacaatttttaaatagacacatctagcaggatgtctttttgccgctctcatgaactctaagtgccacagtgtgaggaggggcttgtttaggtggtttttgttggtgttattataaatttcacatcaagatgcttcacccaaagaacaaattttcaggcccagtgagatagttccttctgtggagctgggttagtaccagatccaagacacttgtgccttaaggttcatagattctaactgtcccccccccacctccaccacaccctcttctgtcattcctgacatgcttttcaggacagatagagaatgaataaagcaagtcatgagtatgacaaggacatctgggagataaggagtgtgtcctcatgagacatttaactgtgataggacacggagccagtgaccgagtatcctcatgggtccctgctgagaaaaggagggacttcagtgatgaatttctagaatagtagagctttgctacattcacctaaggctgacacgtgcaagcaggtcagcgcaggggacaggattcactaaagcaatcttaggcagaaaggagtttatcaagggtgtcaattgggaagctaggcaggcttaggggacactcatggacactgtggccatagacagtgtagccagggagaaatgaactctacttcaaaaggtggtttccaaagtgtttctttcctgaccagcagcatctcctgggcattccatggaagcatactctccccggcacatctcagacctattggatgagaaactctgggcacaggggccagcaatctactttaacacattttccaggtgatgctgatgaacagtgaggttcaagagttgacatctgtgatgggagcaaaagcaagcaccctgccaccacttcctaggctttcactcctgtaaattgccggagctgcaggggacgagccagcctgcctgtttgctaactggccttattcccttgcagaagctgttggtttctcttccactgtctcatgtggctggtccaggtttgagatccctggaagtcaccctccaggttgaggcaaaaccattacatgctagccccatgctggagtttagctttctagcctagagtacagaaatgggtgactgcaacggctgctgagaaagccaggctttataccggctgtcagcctacatctgcatccctgtgtggatcctctcatgcatgtcagcctatgatggcacaggatgttagaacttggagaccatggtcccacgccctacctcaacatgagataatagtaccccaactctagaaactgtactccagtcctaaaaacccaagagttttctacgggccccagggggcctaaatacagatatagtctgcctcactcttacagacaaataatgaaattagcctgtggcttgaacaaaagcaccccttcctagctcccttttttgtttgcagagacagaatttcagggagcccaggctggtctcaaactcagatagccaagaatgccttcaactcctgatccctcctgcctctagttcctggggtcacaggcatgtaacaccgtgtgtggttttctgtagtgctggaggttgaacctagagcttccggaatgccaggcaagttctttgacaactgaggtgtactccccaggcctctagttgtccttttcattttaaaatgttgacatggcctttcactaggttacctaggctggcctgaaaatcctagacccaagtgaggcccccactcagcctctcgactagctggggcagcaggtgtgcactgccgaatttggatagggtttgggggcttgggggggggtactgggatgaagcccatggctttatatgagctattatatagctctgtagttcccttttgaaaatagaagttaatatagaagctgttcccgagagaatgtgagttccctgccaggatgaagtgtaccatttctcagtactaaacagttactaaagttatatccaaatactgcacaagctctttgtagacacatctttgtagaaacccattttaataaggccatgctttcccagggctggttgtcaggtgcgtcagggcgccgattatcaacagcagaagacagacagcatctacctgtcttcaaatctaaatgggtcaagtcagagatcagtgacttcagttgactgtcacccgaggccctcacttcctaatccagctcaagcatcatctccataaagaggagttgcttgggactaagttaagagctcttaactgcttttgcagaggacccagggctggttcccagcaactgggcaaccggaccgcctctaatttcagtttcatgagataagatcccctcttctgacctctgtgagcaccgcagaaacatagtacccagacatacaggcaggcaaaacatccatatgtataaaataaaaagggaaaaaatctaaaacaagcaaagcagtttaaacacaactagtaaaaactaagtccaagggttagtttgggttggcttgtctgcctgcctcctctttgtttttgaaccttttgcttgggttttcaatgaccatggattaatttgagccaggatggtgaaacaaacctgctaaatgtgctctctcctaatgagaatatactgtgttatgcaattatattagccatctatttttgacactgatgatagacaatttttattatccatatgtacaaactcagcagtgtaaattctgtccagtttggtggtgaattcttttgggtttctgccttttccagttggatatgtgagccacagatttgtggacccagggcattgcttctacagagacaagagatctcttcatattcattgttcttggtcctaagagctttgacctcttgcttcttcgagacagtaggggctgtggctgtttttcttccccttggtcatcttctctttgggatcttgcagagctggaggaaatccatttacctgctgatgcaaggcatcactccaaacatggtctaagacaacaccaatttatgatccaaatcctccatgtctgggcacaactaagttgctacagctacaaggctgcttcccagatgctcagtggacctgtgatctcatccaggatccagtgggaggaagccatttccttgctcacaagttgttagcatcaatgagtgcctcatgagtggtcacactaaggtcctgggtttcttgccatcagtcagaagccacactcagctccttgcagtgttactcttctcagcacaaactgctgtttcctcaaagcctccaagtggggctgggggcagggtgtctccacagaatgtaagcatctcagttagatgtaacatgatcacaaatgtggcatcctattgctgtagtctgatggtagaagcaggtcccaagctgtgagaacatcacatcttgggtgggaaatacctagagccctggtaatgtgggtggtcatgcagtgtgcaacactgatgttttgaaattttgcagaatgcatagagcttctcgaacaatgtatcacacacacacacacacacacacacacacacacacaaactctaaaagagcaggccacactgatgtattcctgtaatcccagcacttagaagattaatgcaggctaaagagttcatgaccaacctgagctacatgggacattgtccccaaacaaacaaacaaacataacaggatactttaagaccaacgggaaacattatttataaatgactctacattggtttaatttctctgctagaagaattgaagtaaagattggtagcatctatctgtggcccctagccactcagaactgagacggcatctctgagcaaatgaattcaagactgattaggcagcatagtgagatcctgtctcaaaaaaaaaaaaaaaaaggaaaagaaaagaaagagaaaaagaaaaagaattttctgtctagtattttccagaaggtaagctgttcttcctatggcatgcattatgtgttcagacagccccggtgtgctggtgcagttcagtcatagagcacacgctcaacattctttgggtcctgagttcaaactccagctccacaaatgcacacacagatgtttgtttttacaaaaacaaacaacaaaaaacccctttacccttatctcaaataggtagaaaggggtcatcaaagttaaagaacagattaaaatgtaccccttgtctgtagggtcatgtgtagatgcctcctacccagacaatcgtgtctgactgtgattccttcggtaatatttcctgaggttatcttctgcccgggctgtgatgctgaagaggtggacctcagctacagtgaagagaatgtgttctcgttagagccaagcatccctgtaatgaccagcagggaatctaacttctctgtggtttggtttccttatgggtaaagggatataaatgagacattgggagttaaggagatggctgggccattaagacagcatactgctcttggagaggacctggttcagttcctagcactgatcttgggtgtctcacaactgcctgtaactccaacttcaggggatccaatacctgtggactctgtaggcacctgctctctctctctctctctctctctctctctctctctctctctctctctctctcacacacacacacacatacacacaccttaaaataataaaaataagtccctaaaaatgagacttatatcagttgattttttttttgttttcttcttcttttttccctgagatagtttttcctctgtatccctggctagccttgagctcagaaatctacctgcctctgcttctcgagtactggaattaaaagtgtgtgccaccaccacccagctacatcagttgatccttcagagccagatggatggcagatcagccaatgccattgaacttcccggaagttcatagcccgtagtctcagggtcttctgaccttgctctggatttcagatggattctcccactcccagcctgttgccatgacacctcagttcaggttcacctgtggtacagtaaatgctccacagtgttggttgcattccagatgacaagtactctctgatattcagatgaggctgggcccaaatccagatgggtcagtttcttcttgtgaatttggagctgggagtataagagcaactcaaaaccagccccactccggcagccaccatctgctcctcaccttcctgaactcttcagagaaattgactctggcactgggaaggaagttagagtggcccgttctcctgtattgtgtccatgtagtcatcattgccaacccccccccccatgtctgttctgtttcattcctctctttgcactgtcccgggcacccgctgatctaagatttacaagtactttataatattatatttaacatttacaatgcagccatttcactttccctttgtgtgtgtatgtatgtgtgcatgttcatgtgtgtacaggtgtgtatgtgtacatatgtgtggaagccagaggacagcctaggtttttgttcaggctttatgcacttgttttgtgagataaggtcatacattggcctggaactcgccaactaaactaggctggctggccagtgaactccaatgattcccccatcctaggattgacattcaccaggtgtagacgtcatgcccttgctccaagtctcagctggagaacatggcaaactctgggccattctgcccagtccaagagcccataatttctccctgcagcatggtgacacttgctctccataatgtccctgggtttgttgaaagaagtgggtgttagctctgagagagggagaaggtaggattacatctttggaagtgtcaaatggaagaggctgcagtattcaatgtggacactaggtggcagaggaccactgggctccacagtcccagtctggctcgtgggttttgcttccggacagttgtagttagccaaaggttgttatgtccagctgtaaatctctaattgggatgtgaagaaaaggctaggtgtagcctattaaatagttacccgagttaaaaggttccttactttacactcttacacagtgtcaccaaatacagaaactacttaaggggcaaggattcattttggctcatggtttgagggcacagtccatggcgggaaatgtgtggcagtcttcatagtgtttgtggtgccaggtgtctgtggctgggactccctacatcttggtagacctggaagcagggcgcttaggccagaaaccataccaggctaacccataaggtcgccctctagtggccagcttcttcctgaggcttcacctttgaagggctcacacccctctgaagcagggccaccctggggaccaggtgttgagggacaccagcctgtggaagactttctcactcaaacataacaattctccggggcacaaagggggaattaagagctgaaagccatgggaatgagaaaagagctgtgatacatctccaatactgcaaaattccatttaaatccctccttttaaaaaaagagcttaaatcaaacccttgtgatacttccaagtgagacaagtttggacaccctccaggcaacccagagagaaactgtaatgctctgaacggaggaagcatctgtgggagaaaggaggagaaactagggggtgtcagggcagcttggtgatggtgtgtggcgaggtagcctgtggcaccattaacacaatgatgggcctgttgggaggcagtgatcactgccagctgctgtctgcgaggcaggttaagagaatcgtttcagatgggaggctgaaatgcacaggaatgagtcctgaacattctagaatgcccctgaacgtggtgagattgcagagctgtgcattgagaacagcacgggtctggtgaggcccagggtgggctgcctgctagagatctcagtccttggaggacaggtctcctctctgtactccgcagatagcttagagcaacctgtgggtcgcagcccttcacaggggtcacctatgactaaaagaaaacataggtctttacattacgatccataacagtagcaaaattacaactatgaagtagaaacgacaataattttatggttgggaatcaccacaacatgaggaactgtatgaaagggtcacagtattaggaaggttgacaacgactggcctagaggttcctcaaaggagtcttcttgctgactttaggctgtatcccattgcttgtcccatcccactgcagcaacctgatgagctcagtcacactgcaggggatggcccattgtgaggctgggcccagccattattcccatttgtggggtaccccgagaatgatgcttgcttttatttgagcacctctattctagagaaatgctaatgagggaaaggagagaaaagcagcccaaactgaagagtttcccctaagcaaaactgccatcattcccacagtgctgtgcagattacagagtgtctccattagcacaggctcccttgatgtgacagggagtgtctcccagctgtgacaggctcagacaaagcagctgcagattttctttgcctttccttctaggagtttcttcatggtcagcaagtcatatgacctgaacataagtaggatagggttgttggctatgtgtgtatgagacagtatggaatctgtatggaatctgtattttacaggcagggtgctgtagcttgcaagtactgctggcttcccatgtgaatggattctttgtagtcctaacttgggcaaggtagaatgtcagtcttcagggtctcagggtactcgattgtgaagaactctggacgagaggaatatgatagttaatttactgcttgggttagaatacccatctagctgaacagtggtggtgcatgcctttaatcatagcacttgggacacagaggcaggcagatctctgagtacaaggcctgcctggtctacagagcaagttccaggacagttagggctatgaagagaaatcttgttcgagaaaaacagacaaaaaaaaaataatgtccacctaactaatgagctataatctctgggtgtgtctgggagggcgtttgcataagagaggaaaaaaagacatttaccatcccatctattgttagtttggctccaataggacaaagacttggaaggataagctctcgggtctctgccagggtctccatcctctgttgcaatcagacagtggctccctgggctgcaggctttgggctttggactagaaccacatcactggcttttctgggcctccaacttaaataaagatggcacattgtagaggccattggcttcaagactctcacagctcagtcccttgtgcaccaatatctcagtgtctgtatgttctattggctctgtttcttgggtggtccctggctgaatcatgagcagggaaggctgtgtacacaactgagcatgggcggtatttcactgagcaccagagaatgggttaggagcagtagatatcagtctgtggcagaataaccagtattctgatcctgtctgctgcccatcgccacctactctctaccccactttgtatcaccctccttccttccttctctctttccttccttccttccttccttccttccttccttccttccttccttccttctttccttcctttttttttttttttttgttatggtctccctatgcagcctggctgctctggaactcactatgtagaccaggctgtctcttccagctagcggtgatctccctgcccccatcttcctgggattataggcatgtgctatccctgcagctgacctgatttctgtggcaccatacttcagaggcagaagacctggcttaaccttggcaggcaagaaaggttgaagagaaaaatcttaaagcaagtaggcatgtgaatttgccaggcatttgagccctgcctggctctcagagactttcccaaagggaacagaagcagcaagcaggctgggagcttgggaagggcaccttgagggactaatcagggccatagttgaggtacagaggcaggtaaataaattctgtttacctgatcaactgatgtccttagatttggttcctaaaattacaacccagagaactgggcagccacacttcaaggacacagagtccctgagaatgcagactttctaataatatcttttctccccagagctgggaaattaagtgccttgtttgttctattggggacagcaaactccctccttttatcccaagggtgggagtgatagcctcattgcttgcttgcttaagtataatatgcttaaagaaagcaactatgggtcctttggcttttgttctagaagtgcctgtctccacaactaggaagtctcatgacctaaccataactagggcagagttcttgaaactaatgtcgtacttctgggctttatatgttgctggccgggctctagcttatagtcattgttttttgttttgttttgtttgtttgtttgttttttgttgttgtttttgtttttgttttttcgagacagggtttctctgtgtagctttggagcctatcctggcactcactctggagaccaggctggcctcgaactcacagagatccgcctgcctctgcctcccgagtgctgggattaaaagcatgtgccaccagcgcctagtcattgtaattggctaaaggtgagacttgaggttgaatggaattctggataattgttctatgagagccagggtatgctcagaatcagacctggtgtcaccagtttagtagggtctagatatgtatcaggtaagaagtcatgtgaggttagaggacattattgtccagtagtcctttgtcctttacagtcagagcaggctgtttcccaaatctacgtggtcataggacagagatgtttgtgtaggtcacgtacagctcagcttgcagtcttttcctggtcatgtggtagaggatgataaaaggcaccagagttgatacttcctgtctgcaatcttacacaaggggaaaagtcatgacacacagctgcctcctaggcttatggtgaagagaaagtggactggtgtatataacatactcctaaacagggtctgtatgtatttgaacattcactactgaaatgtgacataaatgatgtcaaggcaagatcgctctcagtagcttctagtggtgacacaaattcttgacctaggaggcaggaggcctagcctctctgaccaggtttcccaaagaatcatgggagtgtctcaatgtcagtcctttcacttaaaatacagcaatgatacaactagtgacaatatcccatgtgtttatctgcagatgggtacaagcacacagtggattttctgactaggttataatacgaatgagccttcaaatcacaccaagttaaacaaaccagctacgaatgacacctgtcacatggctccactttaaatgaggcatctcagacaggaagatgcacagaaaggaagcagaagtcatttatgcttaaaatttgtagtttgtttgttttttaggtgatgacaaagttctggaaatagagatgatgggttgcaggacattgaatagccataatgtcactgaatcaatattgtttttgccactttttattgagctatacatttcccccattcccattccctcctcccctctccccttccaccttccccctgccccgcacactcccaatttactcagcagatcttgtcaatttcaccttcctaggcagatccacgtgtgtctctcttaggatcctctaggttctcgggggttgtggcctgtagtctggttgtcctttgctttatgtctaatatctacttacgtgtgagtacatatttgtctttctgtgactgagttacctgactcaagatggccttttctagttccatccatttgcctgcaaatttcaagatgtctttttttttttttactgctgaatagtactccattgtgtaaatgtatcacattttccttatccgttctttggttgagtgaaatctgggttgattccaggttctgtctattactgaatcaatatataaatgtctaaaatggcaaactttgtgctatgtatatttcattacaaaacaacaaacaaaaaacagacagagacagacaaaagcagctcattggcagatcatttgctcagcagcagtgagttctgggttcagtcccaagtactgtagcaatactagaaaagcgagtaatgaaaatggagagagacaagtttgcagatgtgggtttccaggaaaagtcatgaggtagtggcattgcctcacaaatcctacccagctctggcctgcaaacatgggaagcaagcactgtcattcctctcctgtgcctcatgccaatcatttccttcctgatgtagctcaggacaaaccccctcatccccaccccaggcctgtgttctgttcccacggcacttctgccagtccttgggaacccttgctgcttttgtctcaggcacctgctgcactggaacttggccttagtcccccagtgtccagggctgtatctcctcctgctttggtgcctctccccacccacatgtctgtgaccaaaaggagtccagacaggaacttccagatgattccatcctttgttccctgccaggagcagctgtggacagttgtgttctctggctttgcaagcactttaaatttttagcctactcactgtgacaaccacactttacttcgtggctcataatacatatacaggtaaatcttcatggggtgacactattactttatgcagtgcaacccaagattgcagatgcgttctggttttataaactccacgtcctgtttgagaagctcactaggaaggctagagggtgggtgtgctcacagctgaccactagggggagcagatggctcagggctcactgaggagcaaattgtcctgctgaggttttgaagtatggcagtctaggtgactgactgggactttaggacactcagcttctcataccccttgacaagtccccttatagagggaccataggtgttgactcagtttatctagggaacaattgtctacctagttgatttagctgtataagcattttcttgacttaatgtctcctgaggcttgttttaatgtcttgttctattgtaagtgttgactcagtacacacctctcttcttgccagagaagggtggaatttgtcccccagcccccaacacatgctttttttgttttttctcataaaacttttcctagtgtggccatccaccttgagactcaccttgaacctcaagtagactcacctcaatgggtcaacaccacgctgtgctctgtgccagactccttcctttcagctcagcaagcaaagctgcctctgcttgttatttggtacttttttggttgaaggggtgttagtaatatttttaaatgatttttgaaattgagtttataatgacatttcccccttctctttcctccccatcaaaccctctcaggcactccctctactctttaaactcatgggttcttttcctttaattggtgatggtggtggtagtggtgatgtatgtatgggtgtattccttaataagtgcagcctgtttggcccatatgatgttacttgtatatatgtgcattcaggctggccatttggtatcagataccaattggtgtgcttttccctggggaggaccatttcttcttttttcagcattctttagatgcgtatacttcttcgtctagtgttggggtcttgtgggctttccttccacactatgtccttgttcaggccatgtttaggcagccatgttggtgagacttcatgtatttagctttactgacatttctagaacatacaatctcacagcaaagttcctgatgctctggctcttttgttcttcctgggccctcttctgcaatgacccctgagccttaggtataagagtcatgtcggagatgtatcagttggcttcacaaactgcattttgataggctgtggttttctctaacagtctctgtcacaaagagaagtttccttggtgagttgtgagaactacatttttctgtgtgtagaaggacaaatatttagattatagttagagactatgtggatttagtaaagtaatggctatacgttcttctccaagatccatgacttcactagccccagggagttggccgggtttccagtaccaggcataatttccctgttgttgagcaagccttacacccaattagagagctgttggttaattccaaggtatgtgtaccactactgcacccttagggtcattatgtcatgctggtcattgttgtggtttataggcatcatagctggataggaggattgattacttccttactttggaagcttgcatggtgctgctggtatcatgagagctagtcagggaggaggctttgagatcagatctaacttggttcctatgggtcatgtagcctaagggcctggagttttcagaagtagggacttaaccttccacctcagtgggggacaaccaaaggcaacagaaatagtgtctgggaaacttcttggataaccctgacaaacaactcaagacagcttctcgtgcccagtgttggagttagatcattatgtcacttggtggagtgttgtcagccccagatgggcaaatttcatatgagctacatatatgtacatgatacacaggccgacacatatcataggtattcttagtgtcttagttagagttttaattgctgtgaagagacaccacgatcgcagcaactcttataaaagaaaacatttaatggggtggcttttacggttttagaggtttagtccattgacaccatagtgggatatggcggcatgcaggcagacatggtactggagaaggagctacatcttgctccggcaggctgtcttctctgccaggttctctctactgcaacctcaaccctcaggcatgctagcatgatcccaaccttgcagccttccaaggagaggtcaggctgctgtcagctatcacagggtagatacctgtctgtcttttcctaggcagtcttactaattaagagcacctcagggaagtttcatggccaagaatacagactctattttggaccctttcctattggccacaagaagtagccatggcttgcaaggagaataatccctcaccaagagctgaggggactcttatatgcctcatgcctctgtgattctgtcatagagactgtggcagtcagatttccccaagcttagtgttgtcagctcctcaaagagaatgtgctagaaaaatctagttctctcttctgtgttctttacctcaaagtatcgcctggaactggcacccaagactctataatgatgtgcttctctcagtttgggttaccacaacatttcctaaggggctgctgttctgatctctccttcacttgcaggcacagctctccttcagctgggcttccctgatggcaataagcatgatttggctgaaaacatgtatcatggacaaaactctgccagtgccactccacccttccccagaggtaccaatagattaatagaagtaagtcccttgagcaagcctggagtcctgcagacgtaatattaggaggatgatgccatggtgatgattgatttctttcaatctatggctctaattgatccttacttctttctatctataagcactctggcatacgacctacagctcctgtcactaaagaatttgtttttaattctccaaggatctaggctggtcctctgacttgtttgggccaaaacaatgccatggaaatgatgagctgctagattgagtccaagtctccagaatcctgtccccttatttcctgcatgtttggaaggtcatgggaacatgtgtaggctgccaagcaggaggctgggattgggtgaacaaagacaagtgctcgcagttgcctgaccagagtagcttacacctgtggaaagctgtgagcctggccaaggtcaggagagccccatcactgaccaccctgacatgtgagcagagaatgcctactgtgatatgctacttgggctttgggactgtttgttggttatgtagtattaatatgggcaaaggtactggtctgtggtgggatattttgatcgaattctgacactcccaatactgccaataaagtttgctttgaatgagagggcagagctagctactagcccactaaaattagccatagaggttttggaggaccaaaggacaactagagagacacaggaagtagtagggtggggcttggagagtctccacccttttggatcaagaatgagagaggcaggggaggtcattggtttcttctccgccacttctccaaccattcaggttcttaccctgatatctgactcccgagtttttaatgataaagaataactagataaacagtccactggacaggctctccaaagagttattaggaacaactttctctcctaaagcaaacacctgtacactgctcttctcttgcactaatccaagctgagtgtcttccaagggtttcaactctatagacatgcccaatatctcggtaagaacagaataagtaggtagtcatgaggtgaaaggaattcttgattaggcatcaagcaaacaggagacaaaactcacaaacacaattccttgtatttacaaaaatttggataacactcttgttacccagctaggccaggtcatcaaatgggttaacattcatcatgctggcatgtagatagagttctccatgaagtggtgagtgaatgggttgaaagggttattggtgagtaaagtgatttgctttcctaatattaatatggattagaagcataaaaatatttttgacagaacatattttttattaatttattttttacattctaatcccagtttgccctctctcctctcctccagcttcccccatttttcccacctcccatctgctcctcagagagggtaaggcctcccctaggaagtctactaagtctgttccatcatctcgttgaggcaggaccaagacacctttctacccgctatgcccctgtgtataggatgaggatggtatctctccatatagaatgggctccactaagtcagtttgtgcattagtgttagatcttggacccactgccagtagcctcatatattgtcccagtcacaccactgtcacctatattaagggagtccagcttggtcttatgcaggttcctcctttgtcagacctgagtcagagatctctcactaactcaggtcagctgattctgtgtgtttcctcatcatggtcttggcccctttgctcatataatcactgctccctcacttccgttgtactccaggagcttggcccaatggttaattgtatatttctgcattgcttccatctgtttctggtagagggttcaagcttctctggggttgtggattgtagattgggtatcttttgctttatggaaagaacacatttttgaatccaagatccagtgctctgacaaccataggattatttttctctttagctgaactgtctaaactctgacacataaaaataaatccgatctctacctttaaaaacactttacaaactggacttggtcactcattcctacaatcctagcacttaggaggctgaagcaggaggattggtatgagtttgaagccagcctgcaacgcataatgagtaccaagtgactatccaggcctacacatcaggactcgtctcaacacacacacacacacacacacacacacacacgcacacgcgcacacacgcgcgcacacacacacacacacacacacacacacacacacacacacacacacaaactaaatcaaaatctaaacctgaatagacaagccagcaaaactaaaacaaacaaaacccataaagaccaggatcaagagtttgtaagacaggccaattggtgatttacacctttaatcccagcactggggagggagacagaagcaggcaaatttcggagacagaagcagaaatttctgagtttgaggccagtctgagttcaaactcactctacataggaaatgagttccaggactgccaaagctacacagagaaactctgttttttttgggggggggttgtgggggaagagtttggaagatagactttgagcttctgggtctttgattatatgtctggccttatatcctgacagtgattgaatgacgtatactttactgttgttcctttggtcatcaaggccgtccatcaatcagtctccatgattgaacttcctggagttgagtcttggagattaatttatagataggaaggatataaacacgttggctccagtttcccagcttaaaacactgatttcttctgcctctttctcatcttaactcagtctctcactctgaagcactgacatgccctgtatgcgttcagaacaacgggtaccttcagttggctcctggtcctgagggttctggtactttccctcacagatgtgtctgtctcagctgctggcaggcatgtctagggtggcctctgtctcggctgtgtaaggacccgttgtgtgcttttggccagtgacgggatgagaacagaggacgggttttaggggcagctgctgggagagcagctgtgtggttttcactggaccctcactggggctccaggagagaccaaatgggctctaaaggggcattcatcagggagggagccaatacacggactctgggatgcacaacaagggggggtctaaatgaatgtgagtcattttctttcttcttacaagactgctatgacttaagtcacaaacgctgggcaagttctgaaagcaaactggagatgaatgcagggtttataaacacaggctatgctgtctgagccgtagaaaaagaaggcttgtcataggaaaaggcatcttttcagaattatcatttcactgggaagcacaaattctacagggaacattgtgactacactaaggcttagtttctgaaagatgcaaaagaaacaccccccaggtgacagacatggaccccgaggtgttctttctctctgccctgcaggagtccttccagacaggcccttgcagctgaggtaagggaaggcctatctacaatgagtcttctactcacagtgtggcctctggatcagcagagaactgtgggaatgctgattcctgggcctgtcctagactgtgtaatctggaaccttgggaattggtccatgaacccaccaggggattctaagtgcactagagctgtaagagcctaagatacaatctgttttgcaatccaggaggtgtgacacagaagtggcccaggcatatactgcacacagtaggtgaccctctctctgagcaactaggatgattgtgtgccattcctgggattcagaaaacagtcatttaaactttggcattgtctggggagtccccagtgatagttaccctgctgcccacaccaaccgagtatcttgttacagcagcccacttctaggaaccagcttcgagattaatctggaaaatttaagtcatgctataggtccactctatgcctttacagtggccttaaagcttccatctggagttgacatattgcttccaccaatattgtgttgccagagcaaatcacatggccaaggctgatttcagaataggatgggaagtatattctattctgttccaactgctaaaagcaccagacaatctgagaacagctctgctggatagaatctgaagttctgagtggccattggaactcctggcaagcagagccatcactaacattatagatatatggtggggtccagagcctcaggattgcagccaccagctatctctttgcttccaatatttgaatctacaccatccatccccagatctcctttgaccaagcttttttttttaaatgatttatttttattttatgtacattgatatgttgcttgcatgtatgtctgtgtgagggtgccagatcctctggaactggagttacagacagttgtgagctgccatgtgggtgctgggaattaaacctgggtcctctggaagagcagccagtgttcttaattgccgagccatctctacagccttgaccaagtttttaactaaaaacatcctgacatgccgggtggtggtggcagcatcgacgcacagctttaatcccagcacttgggaggcagaggtagacggatctctgtgagttcgaggccaggctggtctacagagcgagtgacaggataggctccaaagctatacagagaaaccccagtcttgaaaaacaaaaacaaacaaaaaatcctgatactattattgatgtacaaagtgtacacagcatgagtacacggcaaaatggataaaacactgcagttgctatccaggtgggaagtgggccatcacagctcagtaactctttcctagtccccaccccccaccccaggctttcctcaacagcaactctcttctgattcccacagcctgagtcttttatactcattcattcagttagtattcaccagccacacactggaacccctcagtcctggcaggtggcatttcaaacccaaacacagaggctggtcctactgggcatgctgtcagtgatgggatttttctggaaagtgctacttcaggcaggcctgggagtggatgaattgagttgcagaagcttccaaggactcatcttagctagtggatactgttttcattatctgtttatacacacacagttaagccagaagttgttgctgcttgacatacaaggagcaagtgttcttcccagctgggacctggtcttatgtagttggtattaagccatcgggcatggctgacaggagagtggttcctgcccacccacatcaggccttttctctttatttagcacccagtctctctctttcaggtggctcaagaacccataaactggttccttctgggatgtggagagggaagcatctactagcttgttttggcttaaaccctctcaaggaatacctcttacactggtcccatgatttgaaaacaaggggcatcctctggcctatcagatcaccaaatgacttaaagcagagacagagggatggctgatttcccaaaactgcccaaatgtcttctaacaccagacattcggtacaagtattcaaaactggcgcttggcctttcaacttctgtgcagcagttttgccaaatccagagtgggtagctcaggataccatctgggctcgtcatttttctcccatccccaagggtaccaacagcgactgcagtgagaggaagcagacctgggtaggtctggagcacggtggccaagggctcaccacatccttttgtggtaatcatctccaacaaaatgcactctggatatatttttataatctgctggtttctaaattacagccatgccgaacaagaacagagcaaacttatgattagtaatttccttctgccgaatgtaaaatgaaattgtttcctgccaagggctggggctttaaaaaaaaaaaaagtgcttttagtaaaaaagaaaatggaacagtatcactattccaaagccaaagcaaaggttcatggccttcctgagtagccacactccagctccacgaggaagtggggaaggaaaagattaaattggaaaatataccaagagcagcctgcctatctgctcagtcagtaataatcctcatggtaactaagcttgggaaaaatggcagggtggtggtctcagttccaggcctaccatgaacaactatcccaggaggttcagaaatgcccttgcacatggacaagcaacacagaaactcagcatcgatgggctcttggcacagcagaggtacacagatttcctggttttgacagggtcccacccaccttgctggtcttccttgcaaaaacatctgtgtggagtgtctggtaatgggtaaggaattctcagggtggacctaactctcactgacaagtacatgggatgcttgcatacccaaggcaccagattccaggggagaggcatgatgtatggctaaccagctctccaggaaatccttacctgctctgtgaatgggaaacttagacacagagtctttccctttgcagccggtcctctagagccagtgagatttaaagaaaggtggttagctgctcattgtttgagggaaaaaaatagcagtgttctgtaaggattcttacatgtctataatagtagtctccatattacaaaggcagggatataactctgaggagttggagagatggctcactggttgggagcattggctgctcttccagaggactggggttcaagtcctggcagctacatggcagttcacatctgtttgtaactctggttctaggagatctgacaccctcacacagacatacatgcaggctaaaaccaaaacaaacaaaaaactccaccaatgcacataaaaattaaaaaacaaaaactacatgttagtactcaacactttttgtatttgggcacttgagtcagtagtgtgttccagacagatttctccagaagcaaaatatctccccatgaggagaaatttagccatcacacatcgtaacaatggttggacacattgtcggtgtcattttcttgatatcagggtctctaagttcccactgtgcttgtcctgttgtcttagggcaaattctagccttcagctggaatttccagggcaaaggtttctaggaaattggtaatacctaaagtttggtttgctcttactggataggaagataaagctggctgtctcctctcttagctaagctgcccttgcttagggacctggccgaagcctcctttcagagtccctttacaaagttgtgcctccataaaccatagtcttaccaatggggtaatcaggtttgtgtatatagtgtgtggagatggaagataaaaagcatttgaggtgcccagtattaagagagcaaacatggcctgcgccagtgcacactacccagaggttagatacacagtgtgtaagacttcactcaaagataaaaaagcacttgtttttatcagagcacaagggttcatttcattttctcatttagacacacacacacacacacacacacacacacacacacacacagggtcaggactgaaaattgaactcaggccttgtgcatgttaggttaaacaacaccactgctctagacgcccctgccctggccccacatttacagtattaatgctttttacctcacaataaaacaaaatccccaggatcataaacccctgagaaacagctctttgctcagaaggcatatttggccattaagggacagacaaagccccagtcacgtcccttcacaggttcccctcactcttccacataaatttattgtacccgtttcttaggctttaataacttcctgagccaaaatgtagttggaatcccagagctggcagatctgtttttgggggagagagcagtttgggagtcccagtctctgagacctcacttttatagttcacagaagagggcaggcttctatcccagaggtcccaggtctgctgtagaacagttggcaggcccaggctgacctgaatccatcccagcacttctttcacaactcctcctcaagaaacccaacactgttaagactctgcctggcttcctgtgctgctcaccccccccccccttagccaaccactggtagttgcattcccaaattagttcaggactagcatgcttgcatctggaagaatcaccctggggtgggggtggggtgctccctgaggttgcctggctgatcgtgtcatgtttaataaggttgtaaatttcagtgttgtgacatgcaacctggggatgtggaacctgcgtcacacctttagagggcctaccccgcttggagcttgaggctggtagaccatgctcttgctcgcccagcccagcccatccatcagcatttgtggccactgctgtaagtcatcagaaccaggcagacagctagctgtcagtgatgaatgagggacaagctgaagagcttaatgaaattttattttgaaaatatggcaagagtctaaggcacttcaaacatttaaatacatacacaggaccaaagtgaatgtgacgtgatagaaatacacagagagctagctacactatgtttccctagaggcaaatttggaacccattcctctacctaattcagcctttatcaccagatacagacacagttgggcagctgttaaaaatgtaacattaaacgtttctttatgactattgtggaatataaaagttgaaaatgctgtgtcaatttcatacagaagtctttttatataaaaaagccatataatacatccacctagataaaccagctgaaaatatttcttgctgtaagtttgtatggtttgagagcccatcttctattttcaagccaggcattatcagcctgggggacaagtcgctgatgatcaaagtcatctcaagtttcttattttaaaagacaagagagaaatgaacaaaagcatcctggaatggaatactggaaagacttcccaatggttccactttagtaagtataagtatttgtgggaaactttaaaacaacgatgtcatggagaacctgtcacttgcttacattgtagaagtggcccagtcaagccagactaccgtttcctaccactgcaactaaacggagccaattcagcagccacagagtaggtggggtccatgccctccaagaatggaaggctagagagactgcctgaactttgcttggccatgtcccaccagctctgttttccctgcaaaagtgtcagccttcagcttattcctttacacttcttctgtttgctgttcggctcagcatggtccatatacattcagtatctgtcgcccaaacaggaataattagcagcttcatggtggcacacacatggagggctatgtttacatagtcagtcaaaggaacctcggtgagtaggaccaggagacgtctttcttccaagcctaggggtgccctagagaccagggaagggggaaaaggtagaggttagttaataagtgacttcaggacattggttcatcacagctgacacccacctgtgtgccagagtcaggagatctctagctgagaatgagggacagatgtccaccctcagcaggcatggctctaaagccagccagacttagcaggacttgtccagctgtccaagccaatcagcctcctactctgagtaaattttgagatgacaagcagcctactgatggctttaggaacagtgtcaggaacacggtggcatgtagccatgagctgatcactatgcatggaattggctcctcatgacagctgtcttccaaggatgactgaggcccagcctttccttgcatggggtagaaatgatgaagacttaaagctctgggctaaaattcccattttcagaagacactgtgacctgtcaattcccctaggaaagggggcccgccagcctgtggattccatcctttttgtaaatgccaaatgcctgatactgaccggagactgggcttttgcaaagttgacgtgggcgtatagaagaagagcaatgtccttgtgcccagcttccagggctatggagagagcgctgctgccatcctaaagaggaaatggaaacaacaggtcaggttgagtttctcaaatgccaagaagttggaaagtaacaaaactgacaaagtcccccaaatttagccatctcttcagtccttcaggaagtgtttctggatcttttgtgttgggtcttgaggatgcagaaatgagagaggctagcttctgtccataagaagccaaacacaaggagaatcattcatttactttggctttgcctatcagtgctggcaagagacatgtgttcaccaggtctttaaaaaccgaaggctgtccacgaagaaccccttatccaatgtcccaccagccagaaggggtggtaggaataggaggggtagaaaccttagtggcttttacagtcacaaatgatcaggcaagaactagtgtgtgtgtgtgtgtgtatgtgcgtgaagtctacccagttgcaaacacctcagccttcctctagatgaggaagctgcgatcttgtagcctatagcacctctactgaaagctggaggtcacattcacacacaagcactccaccctgccagcttgcatgcatgcatgtatcttctggaaataccaggggagaaacactgcatatgagatagaaacatcattttgttaattgcttggtttttattaaattgcagggcctgaactggctatgaaggaactaaggcagaggacagtgcagcttatttcctgtctggttttgatcacagcaacaggaaacgattcccatgttgaatgttagcaccctgccctcccacactgggaatccagggagcagcttttcttctagaggtcagatgaaggttggcctacttgtgaatggataaggaagtgagcaatcagccgggtagccaggatttctggtctccatactgttatagattcttactacagagacaagtttttagaaagaaagcaattgagcaaactcccaaacacacacaacagagattgtagtgggggaaaggcaagctgtaaactctcgctcccagagcaagtgaagggaattgtatgttccctggaggcgggagggggttgcccttctacctagtgaagacctcccctgctttgcttgttggagtgagcccagcaggatctggaattaatggcaaaggaggatatttttcctgtaactaactttatggtgttttgaaatgaaggaaagcactggcttgaacccgtgttccacagagagaaactttcaaaaccaggatccgcctggtctgacctctgttgacctgaaccggttccacagcccaagtgctagtactatgctttctgcctgcaagtgcatggtctctttggcctgtcctcttgcaaggtttatcttggagtgggacagactagaagctgagtgagaaggttcatttggtggtgatggaaacagaccaagcagaagtgggaaaatgtacagtcacagaacatccatgttgctaggccacggcggctcccctgtgacactgcatttgcatggctaagtggtccatcgaagggaaaaaatccccagatttctaccgagagactgctcacacactgttcccgccgagtgtgattttgtagggccgacctgttcactcccattaagggacactggttctcatcatcttccttttatgaactcaagggtgaggtctatttatttatttttgctcttggctaatgtagtgtcagactatacatggtaaatgctgctcagttgggctataaaaggaagaggtctggacgccaccagtccacaaagagcaggacagagggggcccatacccgcccgcctctggctagaggcccagtggtactcacattgtcctccagctggctattgcagcctggctgggccagcaacaacttgacaatctctacgtgcccatgttcactggcacacatcagggcagtggagccctcgtcgtcctggatattgacatcagccccacaggccagtaggcccttcaccatgtctattcgcccatggctgacggccagcatgagggctgtctgtcctgcctatgaaagaaatgagggtcagattcagaagtacagattgagcaggaaggctgggggatgggtggagtagatgacacacaaaggcactggagccaggagctaaggaagagcacataggatggagtcaggttttcactagaactctgaggatgtcttagtatagcaaggtagatagctccaaagaggttcaaattctgaacacatttaggcttagagctctgggtctggcataaagccaagaaggcaagagagttggaatcagtaggcaatgagtatatggtgagaaccctagacagtagggtcctttgtatataagcatatttgtggtttccctgcacactgcctgggcggccagacaaagccggaagatgtttgcactgtgggactgaacccacgtgtcactgctgtgctggtcagtacacggactgcagctgtcagtgtgccaccagtacttctctgtcaacctggtcacatcagacactggccagggcagggatatctagcatagtaagcaagacaccaacctgactggccttggcgttcacgtctccacagccaaaaagttcttctacaacctgcatgtccttctctgcctccacggctgcaagtgctgccagcatgataggcgtgtaccccgccttgttctggtgatctacgttacacacgtctacaagaaagaaatctctttagagagagtcatctagagtagcaagtgttcacaggaagtgtggcgtttacaagagccctgggaaaagtgctctgggaatgaagacaattaagaaggaaacacttgtctttatgccctgtctcagagcgctggtagcagcagaaacggcagtaagttactgcagtgtgccctgcttgtgaccggtgattttggtgggacagcttggcggtgtgggaggacgttctaagtgtactcgctctggagcataagccctagtgaggatctagaccggcacatgttcagaaacgcaatcacaagacttctaatgctagtgcttgttctgtgagatcaatattaacgcactaagtcctccaagatagaaagtgccaaagactacctgaccccataggctacagatcttctgttctcaaacctcaagaagtgttccagggctttaatacaacaccaggatgaagagtaatggaaagtagcttttatattgagcaagtatcaagttacaagtgtaagacgggacaaggagaaaactgcccaggaccccacttcattacataataacacaatggactgtacagaaggacttatgtgtaggaagcaaagactgctggtagcaaagtgggtacacacatgtacccaaggtcctcagtccttccacacagaagcacccagtgttacattttatggagccaaaatctattcaaaatagtaagcaataaaaaatgtaaatgaagtaattaactaaaaccacctaacaacggaatcaatccaatttgccaagatatcccttctagggactggaaagatggctcagaggttaagagcactgagtgctcttccagaggtccggagttcaattcccagcaaccacatggtggctcacaaccatctgttatgagatctggtgccctcttctggtgtgaagatatacatggaagcagaatgttgtatataaaataataaataaaatcttaaaaaaagaaaagatatcccttctagggcagaaaaaaaaccatttatttccagagcaatgctgcaatcttgttctcagcatccctgggtatcagccacgtccctagtttaacagtatccccagctaaagtttacagatggaagcagttatccccttatgtgggcactggaatagagaacatgcagcctgtagtagctcactgagagttcgtgtccagcatgcagaaggctgctagccatagctccaacacccccacaccaagaaaaggaagacagaaatggagaatagtaacaaatgataagcatgcttggattcttcttcttctctgtattaacagctccgagatggagtaatgtgcatcaggccatcaagagacaatcaaggaaaccagggaatttcatcacataaatcaggtgttgacattgtgtcttcactggactgagttgtgaattctgtgttagtggcatatcaaaaatactatcttgatgatggaagtgatttgggggctgtcccacttgggcacattactgaagggtcactttctcaaggggctccttctgtactgccctctcactttatgtgtagtgtgacccagagctgcattctgggatggcacgttctcaccagtgtcaattaacaaggtttggcggtaatgggaaaccctgcctccgatttttgtcattcttcaggagtcatggagttgggcaggaacaatgatgactctattgcagctttgttggttgctatcttgagcaaccactcacttctatagggccacatggaggctggcgcacaaggacactctgggcctgtgagcagtactctgccacatagcctgcataattcaccgaggagcgaatgtagccctgtttattagcaggggtacacctcatctgaagacagctgacctgcagcaagaatatcttcaaaacctcctttggaaatagaccgggattctgtttctttattgcccaggcttagtgtactcgaagcttcccatctatgactcaagaacaatattcttgccatgtcacgtggaaaagcaatgaaaagactctaggatggccaaaggagtcaggcacgagtcagctgactctgtgaagacaagtcaagcctgagtgttcctaggggagcagcagggcagcctccatacctgcatccagaagcagcttgacaatctggaagttagagtgagacacgctgtagtgaagggccgtgttcccgttgccgtcggccatgttgatgatgtaacggagcacgtccggggagacagcctcgaatgcggtgatatagtcacccaccatggctggcacagcggacttctgactggacacgcggaaccactcatgctggagggtgttcagacagaacctctgccaaaacaccaagttgccattctatttatagctctctctgagagcaactgaaagtccaaacaaccaggccttttatagtcaaagtgtaagttctcagcatctactctcaagtctcgtgagacccagagcctcaggagcagcttcaaccagcaaacctgaacttctcctggtttgtccacactgtgataactaagaaaggggttacaacagtgtgcaaatgtaaaagagccagatccccaaggttcaattctggattctaccacttatgaacaaatcaccctggggggctgctttttctacatcttagttcccatgtcttgaaaacaaaacctgcctcatttttatagtatctattaggtctggggctcaacttttgagatgtttgtgtttactgaactaaccgatcttgcaagcgaatttttcactggaatcagtaagaacttagcccacccacaactaagttgcttcctgacctagactgactagctccaaactctcccattgcactaggctgggaggtgaggctagcctaggctacatagcaagttccaggccaatctaattctagcactactggtctgacaaggtggctggtattctacaaatacttaaaaatcttcttatacatttattttgtgtgtgtgtgtgtgttctcgagagcgtgtatgtgtacacgtgcatatgcaacacacacatcacaagcatgtgtggaggtcagaggacaacctgcagattttggttgtcttcaagcacactgtggggcctggggctcaacagccagcacctttacccactgagtcatcctgcaggctctatggacacatctctcagggctaggtctggctagtgtggtctcacggacaccagttcctgtgtacatgtgtccaagggtgggacagccactgtcaacttttaacataattggaatgctgtgggcctggcacatcatgtttcgaggattaggtctcattttgctttcatagctctaaaatcctgagagccttgtaagtcacctgagcagcagattcgggcttggatgactcagccttaaatgaaccaaacccgttgacatgcaaagactcatatccatgttactatcaaattaatgcaagaagccacattttcacaatgccctgaagatggagttgccaatgagaggcctggtcaggtcaaggagctccagatctggctgtcagcacaggagtgaatcaccaggcatcacaccaggttagccgctgccacagcactatttgagtgtccggtgctgtgctactcctgacccttaagataatcacggcctctctgctacctccttctgtatctctccaactgtgaaatgacagtgcaactatttttctgtttaaaaatagtggccatctgcattccacatcgaagcctaatgtgcactttcctaactgaaaggaaggctgacctcagccagatacatttcttctaaaaaccgtgcttgctttttaaaacattctgggattttttttttttaaacatcctgggatgctgccctttggatcaggaggttctgtgggcagacgcagaacatggagaaagaggaagactgcctgcaattagccctctcttccttcctgccaagtatgtgcttcccagatgcctccaccctgagaaaagtacagggtgggtaaaggatatcagaagctgggcctcagggaaacagtatgttccctgagctgggcagtacgatgctcactctgcgagatatgctagaaatgaatggctcagaagaagcattcacacataacagctgaggggcaggctaccaccttcctgaccatggggcccctgggtgatgctgcatagcccagggatcattcctatcattagactcaccatatctttgctggtcaaagctttgggatcatttatgttatttttcagtaagttgcaggcagacaacatcttttcacttaattcatacctaaaggggagggaaaagaaatacagaaaactcaggatttgccataagataaaagcgatttttatctgaaagcccacaatcatttactaggtcaaggccatgagccagtctaggcaggtcatgatgattggagctgtctccaggcatgggtgactttattacaacaaagccagtatctctgcgatgaaggtctttgcataagggtagcttccagctacatcagtttgtcctttaggacattacaaaataacatatggaaaagtttattcctttcattgtaagttcttaaaaatagtcttggccaggtgtgatgatacatgcctttgatctcagttcttgggaggcaaaggcaagtgatctgtgagtttgaggccagccatgatctatctacatagtgagttccagtccagccaggactgctcagtgagactcaatttttaaaaatatatatatgtatatatgtatatatatatacataaatatatgtaggttatgtatatatttatatagcttattattacctatatacacacatatattactcttaaggaattacagggtctaaattactatatttctactatgttgtacccacatctagtgaacgcaagtgtttgttcaacacatacgcaaagcccaaaatccaatgacatcgtaatatctcaataaagcccatttgaaactcatgagacattccaaaccctgtggaaacacttaccttgtgttgtcagcaagcttccatttgacaaatggaacagagcaaatgcttgctgaaatgttccagtgtatacttcatagagcaaaaaaaccacactgacgtttccatcttttctcattttataagtgaattctacactttactaacggtgtctcagacccactccttctcaggtgatgtttcagccaaccagagtgtgtgagatttgactccagctgatatttatgacatttactgttgtgttcccaatcactcggtaagcaatgaaacagagccatctggctgatacccaccacctttccagttaacaggagttttggttgaggctaaactcttgtcctgcacatacacaatggttctgtgataacgattctgacatttgcattaagataaaatctgaaatctcatacagtgtgctggtcatcagaaataccaaagatgtctttgtacacaaggtgatgtgttcagacaatgggcactacagtggacagcagttccgtatgccaagttagacagcaaagagttaaagcttcagcaaacaaaggagactatcaactgagcccttctcattgctaagctaggggatctgagagagaccgtaccctgcacttgtatttactagtcccttgaccagatgtgcatgcctccaagacacagaggagactaaacccacagatacagtcataaactgtctgaaccagttaattccattacgcaagcgcaccaagcatgggaggaatcagggaggggacgggaatgtaccacacctctctctgatttccaccttctcaggttcacattctggaacctgcatttcatcttccaccctggcagacttgaaaccttcaatattaactgcagggtgcccttccgccattccctgagtgtcgtcgtcctcctcttcctcttcctcctcctcctcttcctcgggaggatactcaatggtatcacactcgtcatctgactcggaagaagagcttccatctgagctggaatcatcacttgaagttgtctcatacctaggtggcaattgggatttcaggagatgcagggtgtccccataaagacccagtgacagagattcctgtgaagggaaagttgctgcctgactgcagacacctacagaggtttagagcctgcacttagaaatccaaagaaagagctgggtgatagtggtgcacgcctttgatcccagctctcgggaggcagaggcaggcaaatctctatgagttcgaggctagcctggtctgcagcgtgagtcccagaacaggctctaaagttacacagagaaaccctgtctctcagggggtgggggtggggtaggggaattcaaagtaagatgtagtagatttacaatgggttctgatatcaaacagctatctccctgttgatgattggtatcatgtaccccttggcttaataataaaaaaaaggcatgacatcactagctcaggataaattgagagaaggtgactgtatagaaaaccagatctgctgttgctgtttctccctccatctttcctatttttgcccccttcattctcccactgtcaaagtgaacagatgacataagcaaccaataattcctctcttgcatgttctttgaaatcttctgggccacatcattcaataaagcccaagattagtaaaacatgcaccatcatgttaagcctctcttggtagccacttcactataaacacccaacgctgcactgttgctttcctattgagtaatcgactaattgctttgatccagctgcaggaggacaaacaggctcaaccacctgggccaataactgctagggattctacgtagaaatcaaggaactagatcgagggccaggttactacttttcagttgaaatgccctacacttttgctcataaacaaagagagctaaggcaaaagcaattcattctggagaaatagatgactgtcacttggccctggaccaatgctgctagcctcttccggttccctcctgtattctaacatgtacaaacatccaaaggagagcagcaatcctgtttgatttctaaagatggccccccctcccccaggtcagaggtgaagagatgtcgctttcccagcttcagtgggtacccttgaaagaggatagcaagaggagaggagagaagcccaggtacacctttctgaggagggactcctttatcatcaagatgcgacaatatcccagaataggtgccttgacagtgacttaagtatgcaggaggcaaaggagacaggtgtctttgcactcaaacaccaccaagccgccttacccgccattgatgccaatgaactgaaggttctttttggcaccgtttgagtctttattcccatcacttttcttcatgatggacttcagtgtgttttcgttatttggatatgctataaaaaaaaaatggaatcaaagagatggaaatcatgcaagttaaattgagtgggcattctttcctcgtgtttgtaaatatagatctcagtgtgcttgtgcgagaaacgttcatgaaacccattgggaaagtgtgtgcaaacaaagaaaataattcagcattctataattaatgtttttttatatgggggaaaatctatcagtgtgcccagacattacaaactgggtgataaggggcatttgtaccaggctataatgtttataaagtgatgttgtgtctcatttcacccttaaaaaaacacttaggtcaaggtaggaatattggtatactttttcttcagctaagataaccttggtggcaggcagcggcttcgcatgccaacatgtgaaagaatggagggttgtttgtatagcacataatttgtagctaaaactaaagatactcttagatctcctggttgccaaaaatttatataacctgtcttccaggtcaatatataaattatcagctggaatgctggcagtgcggcctagaaccccaacaccaacctgtgaggagactcaccatagaggccggtggctatctggtcatctgttaggttcactggggacagagtatttccctgagtggggaactggtcacggcctctgaccagcttcccttccgccattcctgcctcttgctcaggcattggcacatttaacagtccttcggaccgaaggcctccacacatacaaatacattccaagtgatttcctgttcagaaagaagagagtgtgggtatgtgttactaggaccacacaacatacttaaaagtacttaaaagtcattttgctgagaacaactctcacagagctggagagatggcttggttaagagcactagctgctcttccaaaggacccgggtttaaatcccaagacccccatggcagctcacaactgtctgtaacttcagttccaggggatctgacaacgccacacagaaaaaaatgcagacaaaacaccaatgaaaataaattttttaaagtaaatcatttttaaaaattaataaaacaaaatctaagtctcacaactcaccctctcctcagtgacttcttgtgcttcccttttgaatacatcatagtacttatttacatcacctagactcaaacctctaaggtcttcaataacggttaagctctgtccttgtaaccacaatgttgacctacaaggcttgtgatctgagccatatagcatctctctcttctactgtggctccctctgatacactggtgcaggaaccatgttcccccccatttccaacaccattaagactccagctggggaaaaacccccaacacaacgtacagagcagttcctccaccagggaagcttgggaaatggagtcctcacagcccaggaaatacacttgagtcatcatggcccggcaccatcttgctttccatcgtcattcccatattcctttggtttttgtggggaaagggaccaaagcacaggggtgccaaggttgggatccttcatttcctgacagctcttctactggagcaccttctccccatctcttcacggccacatcattcttcccctccctcctcaactgaaaccaacttttcctatctcagtgcaaccatctgtcacacttttggggtctatgccacatagacaggatgagtcttagaaatatttctctgttaactttcctttcatcatgtttactagattactttgccacatgagaagcatttcatatttgttcactgaacaagcaggaaaatttgataagatcatatttgtaacttaatgtactacagaattctcaatatgactggcactaaaatgatgttgataatataagattaaattagaaagtaatggctgggcagtggtggcacctttaatcccagcactcgggaggcaggggcaggcggatctctgtgagttcaaggccagcctggtctccagagcgagtgccaggacagcctccaaagccacagagaaaccctgtctccaaaaaccaaaaccacaaccaaaaccaaaaaaacctgaaattcatgtttgagacaaggtcatcacactatatatacctggcaggcttagaacttgccacatagacggagttggcctcaaactcatagcttctgcatgccactatgcccagctaaatatttaaatatatttaaatataacacaaacgtacctttatagaagattaatcaggaaaactccactaaaatgaatcagctttggtgattaaaatttttcatatattttctactttgttttgtataatccatactaagtatggatcagccgttttctagtcatttgaattccaaaaatattattctaaggatgcacagaaacatataggaagattttcataatgcccatatttaaaagagaggagaagctgacatgacagtctgtgtaagaaactggtgggtgagctccagagaattctatgcagccgttatgggttccatgtggtggtgtgaccacagcgccaagtcttctctcagcaagccattcaccagcctggctgtcacctctcacggttagtcctatccatgctctttccaagatatggtctaaatcctattcttttaattctgtttctctaggacaccattccagaaagctctcttttctccattattcctctgtaacactcacggtgcaaacaaaacactccctatcctgtattttcagctcccgtgcattccctccccaggagggcaggctccatgaagcccttcttgctgcatctgtatccgtgtgtcttctgcagggtttagaacggtactggacaagagatgtcctcttctaagcatctgtgcaactcatctggaagtcagagatgctgtcagtggccaacaggtaaggcaaggtcaccaggcaccaaactagccggaattagtcagggagaattgctacctgcattgctggaaaatatgttctgggtgttcaaactggctggacttgaacggcctggatgtgattccctgagcttggcaaggcccttcctatgggcatggacatcacatggagtgacacctgccccagcataaaaccctgacaaagaattgccacatgtaagaagagtggggatggacaggtaaaaccagagtggtcagcaaagtccagagagaagattttaactctggacatggctggaagttgtgcatatgaagggacaggacttttaaaaatacaaaaaagggctactatgtactggtgggctcaggaaccaccatcatcattgttttgaggctctggctggcctgcaatgtgttatgtagacccagctggcctcagagagcagcctgccagtgcctattttaaaggcatgtgtcaccatgcccagttttttgtttttgttttttaaactttccccacaagtttcccctgcagccaggatccagaactgttaaattaagattaaacaaaactacaacttgactgctgaaaaataagagtatatgcctccttagtctcaactcaacttggatatgtgtggggtcttagaaataactggcggtttaataactggcctggatcaccaatggtagaccagccagggtgaacattacaagttaaacaatgacaaaatgcaagagtagtgattataaaacaccctccaggattctggcctattagccagatgttccagatacccactgggtggcaatggctcccacatgtataatcagagaaatgactgaagaaggagtgggcagctgtgaatggcttttgtcgttaactcgtttaaaggggtcacagataacaataaaacctgagcttcattttaggacttggccaggttagtgatgacaaaaagacagtgggtgacagaaatcttagtgttctgcaaagtgaaaagcatccatccaatgcgttaattatagttctaaagtgcatgcaggaattattatgtagacgatctttatagcaaaggcaaactatactgaagaaaaataacttaaaatgtaaactttatagtatccccaacattaggaacactagaaacaaagtattaaataaaaaataattattccgtgaaaactaggagaattttacagcgttcccctccctctaattcctctgtgacatttctccctggcttttgaaaatttacaatgatgaattttgaaacttttgttcacagatacctacactactgtggcaagcaaatctaaatttctatttattttcccagctgcttttagaaaacgcaactctgaacagtatggccggctaagtagctgagcagcagtgcctaaggtttagcattccaagtgggttgtaaagaccatttagcttccctgtcaagaatgagaagaatcataatttctgattcaccatggaggccacccatgactttaggtgtttcccccaaaatgtaactgtgtaactgaatctcctgggcacaagcagggacccgcccttggggtgcttgcactggcttgaggaagaagaagcagagattctatttttgacagaggtccctctgcagggggtgggggtgggggaaaaagtacgtgggttggatggaggagcaggaccttttctcttggaattctgccccaagtggacgaggcatggagtcagagacaaaaagttacttccaaccagaagccccggagccacgacaggtcagaactgtggttcagtcatttctagcaccattggggcatttccctgagaacagttcaaacggctgccaagcacgtatcgaaagtggacactcactcggaaattacaccgccagagtggacttaagaatcagattctttttcagcacaaccccacccacatttaattatataccctcccatggcttgacccagaaatcccaggctgcatgagctaaggcagagttaaaatgtgccctgtccaggctcctcctagagaagcgaaggtcctcttctcttccccagaccttggtggccttgaccacagctggaccccaagcaccttcattgcctaacattagtatctccatgggtgatcattcacatttctgtcacaaatgtcttggctgcccaaacagagggccagttattcatgatacatctgtatatctctttgttgcagcagcacacttttttttttgtatacagttgacatttaacatacaactattgatcaacatgaatagacgggagggaatacagtctcaacaattttactgaagcacgaatgagtctctgctcaggaaaagacacagtatcaccgactgtgtttgccattcccgtggccaccatgaattcaagccatttgtgtttcttgaaaattatgaaccaccagctatacgtgtcaggactgagtcagaataagtgtcaaagtcagcatcttcttccagaacacttctgcagtttgctaataaccatttgggaagatcaacggttcaagagagcaggacacaagcgtcagctgaagggctgccaagggaggtggcagagttaagtccttttaagatctttgcttcatagatgaatacctttcccaagatcattaacaaatgatcaagtgacttggcctacaatttcaatctttcagggtcacataaagtcatgtcatggcccccctcccccacttgggtttgtctgtgtaacagagctgtctgtctggcatggaattcagtctctgtagaccagggtggcctcaaactcaagatatcttcctgcctcagcctcctgagtgctgggattaaaggcgtgtgccaccaccagccagcccacttatttttattttatgtgagtattttgcacacatgtatgcatgcgtaccatgtgcacactttcaggcacacagaggcctgaagaggatgttggatgccctggaactggggtcacagagggttgtgagccaccatgtgggtgccaggaactgaacttggaggatcctctgaaagaacagtaagtattcgtaaccactgagtcatctctctagccctgttttggttgtgagccctagcctttgaatgtagcgccatctctccagctcaactagctcttaaaaaaaaggtagggtctcactttttccttctggctagcccaaaattcactatataaaccaggctatctcaaactcagagatccacctgtctcaacctcctgaatgctgggactaaaagtgtgggcccagtagaacatgcccagaagtaatttctttttctttttcaatacagggccttatatacaccaggctagcccactactccttatataacccaaactctgatccttagcctctacctctgaagtattgggattgtagacacgaatcaccacacctcatttagctatcacttttgagaataagaacaaattatggactattttacaaaaaagaaaaagactgaagtataaagatattcaaagatatggactgactctagattaagaagattggggtacagctctgtggcagacagcctccccagaaaggacgtgggttcatcttaagcatcgatatagacaaccctctgctttaagcccatttattccaaaatgtccctaaaactggagtatttatttggtgatgggagtaggtaatgggtggtagcagatagtacatgtttaaatatattcagagaatgcccttagctgaaatggatagtcagtcttaaacagctacttccataaaaaattctgctgggagggaacctggggcggggggtgagtcttatttgacccagacacagaactcagactctgcggagactaacacaaattcccagggctgagaaacagccagttctccagactcccaggctggtagagactcctcaccttctcaggccatttaaacccggtagggggttccaagatctctcttggcctggcttattttgatatttttgtaacattttttaaaagggatgcaaaacagatacagaatggtgtagcacaagaaacaaggagacagctcactagaagaattctgtaactgtttcatttcataggctagaattcctcctacaaacttgcacagctaagagaaggtcttcaagttcataaacgctttaaacaaaccccagagaaccaggaatgcaaacacagagactgtttaagcagcagctcctttgattgtaaaagatgaattcgccaaaaaccatacgggaggcagtgaagttctatctgtgtttgctcagggatagttagatatttttagggtatgtgtaactctgagtcatttgtctagaattttcttcccctttccaaaaggaaaaaagaaaaggggggggggaactccactccttaaatcaatataatcccaccggtgtaaaggaaaaaataaaacttcttaagatttttggttaataacaagagtttccttcctcttaggcaggcacagtggtgtacacctggaatcctagacttgggaaggctgagccaggaggatctagtaaaaggccagcctgacccacacagtgagggtttgtcaagagggaggaggagggagggaacttacttcctgtgaccattttaactgtacaagagaaacaattcttccagtcatcaccaagttctgctgtgtcaaagccatgggacaacatttatgaatatttaggtgagaaaatacagagggaatagcataatttgtgattcaaattttgttagacaaagaaagcatgtttctaaaacacaagtcacaaacctacgctctagtacatagctagcacacacagggtactacaggatagcataatatgtcatgttcttctaaaggacactcaattacatactcccagtgaaattttaaatagagtcaaagtattcagtgtgatgatgtggttaaaataacagtttgcagctgggtggtggtagacacatgcccttaatcccagtgcttgggagtcagaggcaggtggatctctgagttcaagaccaaccttgtctacagagttgagttccaggtcatccaggctatacaatgaaatcctgtcttggatggggtgggggaatgacaacagtttacaagctgtcaagggactccaccattaaacccttaactctagaaagaatgggtctataacacttgtgtatattgtattgagcctaattactgattttgaatgactggcctgacaatttatcagagccccccccccctttccctataatatttctttatctgataaaaattagttggacaggcataataattggtgtgtgcgtgtgtgtaagtgtaagagagggaattcacaagccggaattacgaatgcaaaaatttgggattaaaagggtagggtagggggctgacgagatggctcagtggttaagagcactgttgcttctttggaggacctgggttggattcccagcacatacacggtggctcacaaccatttataactctatgtccaagggatctgatctgatgccctcttctcacctctgcaggaaccagtcattcacacggtgcactgacatacattcaggcaaaacactcacacattaaaaaaaaaaaaaaggaaaaaaaaaaaagaaaaaagtcaacagttacttgcacaagctttgtttagcaacttttctcacaggttcatttctggacctgaggcggcagttttcatttagcccctatgctcagtgccgcagaccactccatgcttcttacataccctgatccctcattacaaccctgccaaggtacaaagacaacctctctgcagagagaatctggactcagactgcctggctggtttcagagcccgaagttaacttcttgaaagaactgggtttgtacaagcgactgctgatactctgagacacatcaacccaattccttattgttttttaaggataagattgtgtgaacaaatgccttttagcactgatatgaattctacactgtgtgagggatactatgaattacgaggtaggtataatgacctagtgttaagaatgctaccaccttcctgtatccagcccacacatacaaacaccctatgtggggtaaattcttgacctaattcctttctcatcagatcttggttgcaatgcatttgtgatataagttatagacagcctttaatgttgctcttgtgtgctccgacagtggaagccaataagactaaccacctgctatgagagtattttttccttttgttcccagctgtcccagatctcgtgtgtattagctgattaattaggtgttcactgtcgggtcagatctacacatggatgtgtaggaatgtcagcctgactggacacagcccaaaccacactgtagcacagtccaatgaaacgtcctggtctccatgcacaggaggccacacaaattactccagtgatacagcagaatattcttgacaagaatgtgaaatagtaatcccagttttgggaggaggaaggaaggctgggaagaacatgtttttgtatcccctctgccacctgtttctgaagtatcgacaaagcttattttgacatcaacatctgacatgatttttttttaaaggatgaggaggcagacatgtaagacttcatctcagcccacatatcaatctaatcctgtttattctaaaatgactcctctgtatttttattatagttctatatataactataattttagagtatattagttatatatatatacatatatatatatgtattagaattattaaaagcaaacccacataaacatcagttgtcatgtgcagtttttcttttacaataaacattgccctatagcatagatactaaaaactaataatcaccaatgtttgaaagcataaacccaggaagatatagaaagggtactgtctactgtcctttccggatataaaggggcacactgagacttctatgggtatcttactaaaatctattccccacattttcacaaaaagattaacttgacgagcatccttcttcctaggtaagactggtacatgagaactgttacatcagggaatggaagccccaggtagtgaccaggattaatagggcactgtgtagagaccgagcacctggtcccaagggaagccactttagagtttcttggggagatgctacatcacagaatatcccaaggtgattgctcaatgactggctttcacttaaaaacagatgagcagcaatcttaatgaatgggaaagacaaaagtgtaggtgcctatcaacaaaagcaaaggaaaaagccatcatcatcaacaaaagcccttatctcaacagcatagtgtccactcctgacacttcactccctgcccccataactagaagcaaatttcctagaagcaaagtttctatagcgcttgctacttcctgacctaacacagacaccccccccccccccccgtgtattgcttgtggcccagtgaccccagcagggagggactctggttgaactctgtaaaatatcctcagagcttatgctaagatgatgtagtaactcaaaggtcatttgccatcttaataagtcgatgaagtgtctaccctctcataaaatgttaactgagaacattttactctagaatttttaattgctcatatactgataattatgcacataaacaatacaggcatttttaaagcagttctgtataaaatgagcaaatgtataaccagaagacagacatgaggcttcatataaagcctcaggttggccaggcctcatacatagacttgctttcctatgtgagcctgaagccagagggcaaaagagctatgcgagactgaggatccgcaaagctgcttatgtgtctcagctcttggtttgcattcaactcattaccatcctaaagctttctccaagattccaaagtaatagttccaatagttcaaagacaaaacaaaacttccttacttcctagagagacattctccccatccctgcccctaacaattcatgtggtggaaaatgcacctctgtccccatggactgatgtcagtatcccaggagtgggcacgtttttgttccatctcaccttatgatgcattctttgctatgatagaacaaaagaagagcttgctgaaagctggtgccatgctttggacttcctactcttcagagtgctgagctattctgtgtaacctctattctgtaggtttccccttgtcctcacactcaggtcccggcgggtaccacctacctgtgactttacccagcctggttttctggaagtcagggttcctgagctcttccgtgtttgcagacttcatgacagaattgatggatgacagggtgctgatgagctgtgagttgagggagccgatctgtgaatgaggctccccaaacgcctctgccagttcactgtagttctcagccagcaaggtctgttgctctgccagcaatttctgcacacgctcgatgtagtgatccaaaccagtcaccatcccagatgcaagctgagtctgaggaggatcctgcaagagatcccctacaggctcattcccaacacccacgctcctcctgctgcccatcagtcccacagtcaactgtggaggcccgcaagcgatggtcctcattttgagaccaactagatagttgtcatgaatatttatctgtcctacgcctgactctttggtcttcacagcagatggcttgtcaaacccggaattgctggacagcaccgtcccaacaccaacagaccgagtcttagtggaggggtggatgtctttgacacggccttctcctatggccaccgttcgcatctccacagtctgggtgctggtctgcttgtccagagtactgaggaaagtgttggtgcaggactccacaagggtggccgcctccgtgttcgtgcactggtccacctgctccagagttgtgctggtgtgctggtttgtggtatgaggcaccgccatgatagcagcttcctcgtggcctactgcctctgtgttcatacttcgggaggtgcactccttgggaaagcagacaatcacatccacagaacagtctccacagccaatggaccgcacatctttgaggttcaagtttgtcttaagaagtgtcagatcgctcccagaagcctctgtgttgctgcctgtttcacagacgctgacttccacgcccacaatctggtcacaagtctcaacagactttcctatgcatcggtcatgcatttctactctctccttcacgacccaccaattcatgggcagctcgggccccacgacttgattcttgcagtcaggttggcaggagacgcctacactacttgtttgcacagaggtcccaacacatgaatccgttgtgtccacatggctgccaaccttttggtctctggttggtactagtgcctccaccaacttgctgaagacaagtggctgggccattgtggccttgtcaacttttttcctgcatccagcagcctgtagttcttgctttagtttagtcatctcccgatcatgggtggtttctttaagctgcacttccaggcggtaaatcttttcctttaaggcctctatggtctgctgttgtagctcaatctctttgtcagcttcagtaatcaccccgagcatggcttccgtcacactgatgccaaaattcctcgtttcagtgactgtccctacagctgtatccttgcaggacctaaagtctctgtggtaaacaacaatgtcactcatattctcatcactgcccacagccacagacttgcactcccgagacgggcactgtccattctccctgagctcggatggggcctcacagctactatcctgaatcttctgctccagagcttgcatgtcagccgtgagctgccggaactccttaatcctctgtgtgctctgctgcacgctttccatctcttcttcctcataatcaatgtacagctccccgccacctcttcgggttcgggaaagcaattccagctgggaggcattgcctgcactgtaggaacgcttcctcacaccacatgcctcgttctgggatgcagccctctggtttttcagctgggaggccaactgccttttctcttcttgcaagacagagatcttaacctggagcacggggatggtcctcacctgctcctccagttccttcaggcgttttaaggcgatggccatttgttctcgaatatgctgtaggtgcatggggctcacgttggtcacgggggtggagatccctgaactcagtgggctgtggcggatggagctccccatggaggaagtggtagcagctgctggtacatagctaccataatccccattgccttggtatccattctgaagctggtgcatggccgaattgtggttaccagaacccataaaggatgggagggagctcgtagagcccatgcctccaaaactggccagcctgggccttctgaactcacccggtgccatctgcatggtgactctctcctgttcgagtcttctccgggtctccatcaacgtcttggtgacatgaaggttgtgctttgggagttgaggtgagggagggggcagcagctgtcgattttctgggatggcaaaagtgggtgaggtctctagtggggcaggtggccgtgggattggggttgatgtaacgtggcttctggctaggaggaagctgggacactgcttgctgtcatcgctgttggaggatgacagggattcagtggaagtccacacaccttgatgagcagatgtggccctgacttctggacatggtgcggacggctttcgcttcttttggatgttaagtctcttgatcgtatttcccttctgtatgtcatccacgtatttgacgaaatccaagtctagctgaaaaccataaggggtttccacaaaatatgggtctttctgttccttgttatggtctccattcagaacgtcatctgctttttctaagagagaggagaaaacatgatcatacacccattacatagtttagtaacaacaattacttgtgagtgtagcacaagctagtctgctataagagccggcagtcctattttctgaaccttaactctgaatgaaaaaatggagacactgactgtcataatgccacgagtctatgatcccagctactggagacattaaggattccaagttcaagccagtctgggcaactgagatcttatttcaacataaaatgtaaagagggctgtggctgtagctcagtagtagagcaatctacagtactaacccccccccacacacacaaaaaaaacctagaaggataattcaagtattcaactcataacattatgaaacaatggtctttagagtcaagcacatataagtacaaaaagcctgacaacatagctgtgtagatcacttgtcctctacagttatttgaaggaaaagagagggcatcttatgcagagtccactaagtctcaaaatgcactaagtcagcagagtaaaagacagggtcacagcagatgcatggagccaggtgtgtgtgtgtgtgtgtttgtgtgtgtgtgtgtttatttttctgcaggtttggtagtcttttcttgccagtggccaagaaccacctagtgaccgactagactatttccacatgattccattttgccccgaccctttcctgtttccaagcagaggacccaggacagggagtgaatcctttggtagcctagttgcaagaacatggtcagaggatagactttcatgtactgttcactttttctccctacttaaaactctctcccgctgggagagggtggtggcgcacacctttagtcctagcactcgggaggcagaagcaggttgatctctgtgagttcgagaccagcctgatctacaagagctagttccaggatagcctccaaaggcacagagaaaccctgtctcaaaacaaaacaaaacaaaacaaaaccaccaccacaacaaatacccctctcccaactggaggaaacttttctccgctctgccatgttttgctttctgacacaacaatcactaactcacaagcaacccaaacaggtccaaaaaggaatggaagtaaaggcaaaacaaactccaactttggggtcatgtgctattcagtaaacggtacttctggctaaaccaaacataaaagaggaaacacaggaacctttcaaagcccaggccttgatgctgatctgagctgtgcattgcaaatttaaaagcaacgtctttttgtttgtttaaactgtaggaggaggtcatatgtttttctacagccacactaacttcaggtctatggaaaggacggaaagctaggattgaaaacgagagccatctgttcccctgccccagtccgggttgtccccctgactacactattgtcaggcccaaggatgtgaagcaaacttggctgctgcctgccctcccagtcctgaccaccgctccacgttacagctgatgccgaaagcttggaatgacacacccctccccccagcccttgcgtttctctctcttctcaaactctggaaagtttaaaaagattgccaaatgggaataaaaatgggcacacattctttgtgtctcactttcaaacaatattaagaatgcttggctatagcctgtggcctgagtcctgggattcagccattccatatacacacataatcccccaaatctaaactaccccgggccgctgcccctgccgccacacagcagtattaaaactgataaggaattctctttgaaataagtgccctagcatgagctgacccagagcgccagtgtctggaaatttgagctcatgctaacagaatgtgtcttcccctctctctttactagctttcaactccacaggacagtgcgctagctcaaaatatgcagccagacctgtttccagaaccgtctgaagttccaaaggaagcaaggaaaaaaggacagatcccaccagcccagggtgtctgggggtagggtggggggtatactcacccggggctcacagtatggtgccgggcggggcgggggcgctcagggtccaggatggaagaagccggagccatctgcaggtcgccctcactctctaagcacttggtccagccctccccaactcacctacagcaggcccacagcagggcagcctccggctgcagcaccgcaggcccggattcctctcctctccacttaagggaacgcctgtcaactcgcgcacacacctcccaggcccgcagggacaccataggcccagcctgcaccaatgagggctccccgcgtccccgccaccgtcaccagcaaggcacactcagcagtccggcatccccctggtgtcttaatgaaaacaggaagccgcctgccttcttcggaaaacctgtgctcttcgatgcagctttgccagcagcccaaataaagccggcaatgtgagcctctccaccgagggctcagtctgcccctggggccagacacttcatcaaagagtctgtgttctggaggcaggcccagcaaactcagcccgggtcacctgaggaagggcagggccacaattggccactgttccccagcactgaagggcacttctcagcctagctcctgacaggtgaccggtaaccaacagccgagccctggccatgaatcttaaagaaaattaatgaaacaggccatttatcggctgcaaacaaagtagggcatgctagcaagaacatcacagagacttttcaaagaaaaagtcaatcatgccagtggcagctggcatgacttctaggtttttcttatcaatgttcccactgcagcattttcagtaggaaaagtgtgtggattcagtgtcgggtttcaggtcaccccccccaacacacacgcacacacacacacacacacacacacacacacacacagagcacacttttcagcaaaacttaactggcctatatttagctacttctcaagctcagggagtagagataaccaaaggtctgggtcactctgaattatccccaagtgacagtttggacttctcccctggaaatcaggggtagttagaatttaaccacagcagacttctttcccaaacactgctgagtcccaaatactgaaagggcactagcaataaagaaacaaccacaacaacaaaaaccagatagagctgatggagaaacaccccccaaacaaacaacattctcaaagtgtcacttgtgcaatcatcctgggtaccaagtattttattacattgaaacagccagcctcacttcaataccttttatttaattaacttatttcttgttttttgagatgctggaatctcattagatatttctggctatcttagaactacctatgtagatcaggctagccttcaaccagagatccaccagcctttatgtcccaagtgtttggagaagaggtgtggccaccacagccaggacgtaatctcactatttttgtttttaaatctgctgatttccagtgcattgttacacaagtacctgctgacacacctatggcccatacttatttctcaatttttctgcaaaattatgtattaactttatccctccccctacaataaacatcctcagagcaatagattcaattttcaaacactttatataccacttaacaagatattaggatcaaagtagacgtttaagacccctttagtggttattttttgggtgtggagtgagggttgatatatattttgcacttaaaaatatttttttgatagggaaagagggtttctctgtgtaacagctctggtcgtcctgaaacttactttgtagaccaggctggcctcgaactcacagagagccacctgcctctgcctcctgagtgctgggactaaaggtatgcacgaccaacgcctggcacgaactttacaaatttttatgccacatggatacttaaaaagaacaaaacaaaacaaaactaccacagaagtcattgttcctacaggaatgcactgcagtaaaatctaagcacactcaagtgggcagagtgtgaaagccacaagggaagacagttcatatccctcttccacagtagaattaacttacttttagatgagtaaatataaagccagtgtttcccccaatctacttttactgttagtgtggccataagcagacagttcataaaacaaccccacccccacccaaactgtcctcaagagacccaggaatctttcaaattcttttctccatcccttcctccagtgaagttatgatgctaagatcaccagctgctaacttggctcttgagtttacacctggggatagaggacccatgtgcaagaaaagaatctgggcctcaagtggctttgcggatcagagctagtattaagactctcgaaaagcctatatctctgtactttcatttgagagaaataaactttagagtgatcccaaattctaagagatacagcagcttctatcctgtgatttcttctcatctctaccctacccccaaattgtaggctatatattttaaaaagaagaaaatgctaaataattaaaccaaggaggcattacaacaataaagcttttactatgaaaattggtaattcaagaataaggaagcacaatgcaatggcttttttggaaaaaaaaatccatagctgcattataaagaaacttttttagctatctcaaaaaaccctgtttagactaacaagaatatgtctgttttcacatagccaaaactccacaagctatgtggaattctgcaagcaacagcttccgaccgttctggaactggagggctgcccaggtgtttacgagaattttctgaatgtttgggaatgtagtaatggagtcagactacccctagcacccctctgtcttcattatataacttttattgaaaactgactgggtgcagaaaaatgatcctattctgttgaaagagtaggagggaaaatttataagaaataaaatgagatgtataggctgagaaaatgaacacaggctgaagttagttacaatgacacgctatcaacaagcccggcgacaatacatgaacaagtggccaatacagaatgggatgcccaagaactgggttttgaagaccaggtaagtaatgataagaacagcaagggaagaggggcaggactgtgtttgtgagagcagcttcagggcaggtgaggcaggggataagagcagaagaggccctggtctgtcgactgtagtatttggccaccaattaggagatgaagttaaaaggcaccagaaatatgtaggtactggacttagctaggcagagagcttacattcagagaaccagttaaaatggtctgggggctttctttcttttctttctttctttctttctttctttctttctttctttctttcttttctttctttgaaggacagttttatcacttatctctgtggctgacctggaattcattacataagccaggctggctttgaactcacagagatttgccctccttcacctcccaagtgctgggtttaaaggtgtgtgtttttatacgtgacagcaattaagagttcttaataggcactgggaaatttagaccaaagaagatagaagatgggcattcgtatgtgcaacttacagtcaatgttgagactaaaggcttattaaaatctaccatccattcatcttcaccacttaacacttcctgctgtaggaactagggccataatgccaatgaaaggaacaaggtctccattcttacgtggctcactgtctagtgcagatggggcacacttggaaaaaaaatagagatgccaaacaggagtgaaatgaatacccaagacagagagccctctccagcctttgcgccggtatgtctgggtaactgggtggtttagctaactaagtgtgctgcacagcttcttggaccagcatcctttctgagctggcctcacacctgaaaaatgaaaggtcatatagttctttctcctcttcgatttagacctagtctgccccatctgcaattagagctaaccacaaactaactcgacagcctccatgagagaaaactccccaagtccaggacaggttcccatgagttcagagggaattcaaaatctacagtcgacgacaacaaggcttttctttatgtgtgcatttaccttctgtaaaactccaaaccccttccgggcgatgatggtacatacctttagtcccagcactcgggagggaggcagaggcaggtggatctctgtgagttcgagaccagcctggtctacaagagctagttctaggacagcctccaaagtcacacagaaaccctgtctcgaaaaaccaaaaaccaaaacaaaaaacctccaaatcccatgaaaaaggcccaactgtggcttcaagaaccgtatagcattttcttggggcttttctgcattcgccaatgaatttgagattagagatatgttaaaaaatcatttcacctagggccatgtgttacttattcagttttaactttttaaacaaactaaatccattgtcaaaataatattccatttgggaaggcctaaaaatgactctactcacctagaggtagcagcttagatagcagctaactagtgtgagagtgtgactggccagcagtggttcccaactcagttttgttttccatggtgacatgtggcaacatcacaaggtagtgaaaaatgctactgctggtgagtggcttagtgagcagagcccaggggtggcactcagtgcctggtctgcccctcccccaatagtctttcagcctcccaagggagcaaaatatctacacaaagcaacatcccaacatgaggctgtggcctttcagccctctatttctcaatgagactaaaacactatgcgccagggacagggtgctctttaaaacaaacaaacaaacaaacaaacaaacaaaaacaaacaaacaaaaaaaccagtcttgctgtgtagcactaggacatggagcttgctctgcagacctcaaacatagtgattctcctgcctctgtcttgtgagtggtggcattatagatctgtgccgccatgcctcatggcctgtcttttaatcagtgtatattcattgtatagaacaataaggctttgtggtgtcattctttcatttggataccacgtacgtcagtcacactcacattccatactccttgtcttacttctcttgtcttttccttatgccccttctctaaagagttcccgtttgacaggaaatatgcaatatttatatttctgagaaaatgacactttttagtaagaaacactcactgttttctagaccataacgagctattcttcattatgagcaaaaagcaccagacatttccaaaacaatgcgccctggacttttaaatggacatggttctgatattattacactgttcatcaggaatcaatgaccccttttgttctgctgcacactctatgtgcaattactgaggacaccacgaagaataattatacccgtgtgccacaacctcacacattgttaatgtgtttttactcaccagacactctcaccggctgctgaagctaacgagttaattcccattaacacactgtgcccatctcacaggaagcacagggacctggcccaggagctgtatcgatcccagagagacacagcattatcacagactcccacatcaagtggccgagtgtagtaactgctgtggggaacatcacagaggacctacagcatccaaggcctggaggcaggaaagaaagccacaaggatgaactggagggaggcaaggcccggggttgcaagacagctcctccaggcggggacagtggtacagagaaagcaggaaaaggcgctggacccttcagaacaggtctagcagaaagcactctgaagacactgcgcattaagctttcagatccaagcaccctcccacccaataccaaatccacctgagaaacagcacttaggatacaggaaaccacaagagagatgccagtaacatgagtatcctgcattctgcaaaaaaaggaatgtgtggcaggtaaggcactttcttgaatttatccaacagttactttgttggatgcttcttgagaggtcttgttatgtttcatcccaggctagcctcaaactcaagctctgcctcagctgccccagtgctggacagagttagttgctttcaaacctgctttttgcctcccagctaaaacccattcagttattcagccactccaaagggttcgaggctccgtttgaagaaagctgcagttctttccccttggagtatagactgcctaccttaatgctgcaacatatccctacagctactctgaatacctgtccaaacacttatgtaaataaaacaagaaagtgaaaagctatttccaaagctttaagtaccagacccaaagtagcaaaacagcaactttacagtttgctttgtttatgcggctgtcagacggcttgatgcttctttctttaaatctttagccttcatctccatgtttgtaagcagtgtcagagttgttaaccggcaagtgatctctacatgagccttcctttctacactagctccacattcccagttttcctactggcaatactccatagggggagcctcatcttaggaggatgacagatttagtttttcacatagtaactgatttatgaagaacccaacacgtgggaagctgcttagtgctgtacagaatagccatggagcgagcctgcccaggtagaacttaccaactggagaagacagacaagtgcttgtacagattagcaactgccttagtaaatgccgaggaggagggtgaaacaggggccctcatacaaaggcaggggtaggtgtgatttttgggagctgcacttgagaggtcagctgggcagccttacaagggggaggagatgagaaacatgctagcagaggagggggagagggaaagaccagttctggatcctgaagtgtatcttgaagctattgggtattttaaataagggagtgaagtggtccacttacatttttataagatttcccttgctagtcgaaggattatatattaaaattcccttctccatcttctggtacgtttccaagaattgtttgtacaaatctcctcttgagtctcacaagtgagtattgtctcgttagcaagctagataatcaggatggcatgacattaaactatccaaacctatactctgtatttgggcagtcgggacttgtgtcttggtgcccatctctccacctctacaccctgtacttaggaggaaactgagaagtcctgacaaatgtcagcccctgtgggctgagctgcagaccagacaccaggaccaaggctgtgctagcccctatcggctatcccattctgttgctaaaaaggaaaatatttttctttaagccaatgactcactgtggagaaaaatggtgggggaggggcttcctcttctggaggccattaaacaacaataaatctaatctgtgaaggacagggttggcatgagtaatgccaggaagcaggcagaggacatttagggaatcacacttagggaggaatgcagatttgctccataccctgagattcaggggaggggaacagcaaggattcaaaagtgtcaaccacaaggctgacctggcagccagcaggagtttctgtactttaccccttccgtaactttaatttctccacccagacctgactagttgccttggggtgtgtgtgtgtggggggggatggacgggatgacattcaacaactcggagagggtctggagagacttaagcaatgctcccctctcccagattaaaaaatatttacccaccagatggcctcaaagctagggctggggttggcttgcctcatgtcctgagcattcatgtaggactagatcttcctttgggtgacaatacatgagggaggcatctagagcccacagctggcctctgctgctctcaacttccagcacattagcaatttcaaaccagtgtgagtggtctgcttggttcagagactcttccagaactccattggccacttggataatttaagcatcaaaataatataattaatgataataaccaactgataagtatctgtgagtccataatgctagagaagagtgccagctaatgaccgccataaggattatgggaacagaaaattaccatacagcaaccatcacgacagtggctgatggagacaggaatgactgcgaaggctgctggatggaatatttcctaccaaagatgagattattgctgtggtctcagaaaacctcaagacaaaacagattgtctgtcatgaagggaaaagtgacgtctacagtgaggaagcttacagtgatcaaagctggcattgtgtccctgtgaaatgcactgagatgagtggagtcacttttgctaagtaagatatggctagagactagaaacatttgtgggtcccacctaaaggacgaatcaatagtgccaaaggactttctttttggaaattcccagtcacaaagaaaggaaacaaaactgtttcagactgacagagactggattacttaaaaacataaacttcatttccttcctccttccctctctctaaccctctgacccctccttcccttttgctttaatttatttgttgatttatttattgtatatacagtgttctgtatgcaggccataagagggcaccagatctcactatagatggttgggagccatcatgtggtggctgggacttgaactcaggtcctctggaagaacagacagtgaccttaacctctgagccatctctccagccctccttcccactttaaaggtgcatgaaggcagccggtcggtcatcacggagccagaccaagccccgatgtttgtcttgcagacttagcagtcagtctgctctccggtactgctccattagagaacgttgcctttctttgaggtatttctgagaacacacagcatctctcaagtctgtagaccgatgtgtcccattacaaaaatatcaccctgagttcctttctgcggcgctgagtcttccacagtttagcctcagtctagcacttgccatgtttctatccactcacctcagcataccacacaatattcattcctatctgtggcttctctctccatctagcacacacctccccagactctgccaactgtcaacaccagctgtgctgtccttcagagcctaagccacatggctcatcttcctccaaagacactgttacaccttagctgctctgttccaggcagaactggtcaccttgttcccaccatgctcctaaggcctttgcaggatgccatgcccgatgtcatggttagcaggcacatggctcacccccaccctcaactgtaaatgttttaggaaggtgggaactgagcagaatagatatatccatccttcagtgcctagctagcctgatgcttagcataccacaggcatagtatgtgttggcaccaaaccctcagatctgggcatctactgatgtctaagtacagcgggggaggagatcacatattaaaagcaggtaagctagggcagactgcctatgctacttgctagttattggcaagttagattatcctttaactgtataattaggaaataggctatgaggatgggcagggatgctgggggtctgtgccactattaccagaccactaacaacctgatagcccagaaattatacagaactctgccctaagttctgtcagggccccatgaaggtctgaggttatgtgtgacacttgttcgaatctgctaacctttatcttgagtcctgtgttggtgagccgtgaagcagggtatgcatgagcacatgtatgttctggggcgagggctgggtgctggataggtagaagggaagacctggaccagcaccaacaacacacaggaaggatgctaaacaaaagtggacaaagagcgtcacttttcaaagcatattaggccaaggtaaaatatattcttcccccaggggtgtgcgatggctatcatgagagctcactctgcagtctctggggaggtcctcacagctgagagcacctggacactgcacagagggcgcctgagaactacccagtatatttccatggtggtcattccagcagggccttcctaagctccagaaagctacagttttcgttttgttgaccaagagcatgtactacaagtgtttctttattcacggtcaagcaatgggcaacaagaatccatgaccccgcgtccaaagcggtgttaatttagtgtgtaaaacggttgggtccactagtatttcatgacttctacagctgctgcttgatgggacagctgctgactacactcatgctaatgagccagtgtaagcagatattaattgcaggagctgtcagagcaggtgagctccagcaggacctgtggcttgctgtctgcagggcctgttcacagatacttttccagttgcctcctggtcggtcagcaagactgagcctcccacctcctccccaaatacaccaacccatcggcagtatccttggttctgtgtggtgatatcctgcttgtaccaataaagcttgtctgaagatcagaggatggagcttgccactagctaaccacagaggtctgtatagaggaggaagtgagatggctgggctgagagatgatataagcaggaagaaacaggaactctatctcaagtccaccgagactctaaggaggtaaaggtggctttggcttgctccgtcttctctctgatctctcagcattttccactaaataagactctgggtttttattatttagaccacccaagactcctttttacagttctacccagcacatgacttaagaggtcataggtcaggcaacaagtatcagccattgtccctggaaacaaagtagcctatgtcttataaaagggtatactggaccatggaggtgcatgagcaggcaggctggcacaactgtccttttatccattgtccagagtcaataacagatgtaacaactctgtcaataatctacagcatcccaccagcccgacccatgctgctcactctctatctaatgttcagtgtttagttagagacttggtagtgatttatcccagcttcatctcccacacacaggggagagctgcttctcaacctttatgcctgggctagagagatggctcagtggttaaaagtactggctgcttttggagaggatccaggttcgattcctggcacccatttttgcacctcgcagctatctgtaactccaattctaggaaatcctaggcttttgtctaatctcctagggtatcaggcacacacatagtaacagatatacacatgcaaaatacccaaacacataaaataaacagaaaaaccaaaatcaaagatcaaacaacataagaaacattttaggcctggtatggtagagtacacctttaatcctagcacttggaaacagggtcagacagaactctgtgagttcgaaggcagcctggtctagacattgagttccaggtcagcaagggctataacatgaaaccctgtccccctaaaacacaaaaagaattctgtgcaagtctaagcataaataggaaacaggccagatgacaagaacggttctgtgcaaagcagacaaggtagccaggctgagactgattagagggcaccaactacacttttggggatgtgtgggagaactctttcaggaaccccagtccttacagagctgacataggaagccagaaccagatttaaataaatcccaggaagagacaggcagatctctgtgagtttgaggccagcctgatctactgagcgagttccaggatggcctcgaaagctacagagaaaccctgtctcgaaaaacaaaaacagaaacaaaacaaaacaaacaaagtattggttgccttgcagaggacctgggctcatttctctgcactgacatagcagctcacaactccctataactctagttccaggggatctgatgccctcttttggcctctgtgggcaccaggcacacatgtggacatacaccgttaaaacaccacacacataaaataaataaatctttaaaaagaaaagaaaaaccacgtaaaaacaaatatctaaagagggattgattaacgacataaggggaatcctggaatttaagtaaaccacaaactcagaaacccaagctttaacatctgtgtgaaatggtcgctagtgctacaatgacatctttgtgccaaagccacgggctaaagggaaagttttcactgaacccagaggcaagtgctgagttattttttccagcctgtaataaaggcaaatatttttcataacacacagagctccactttgtattgcagcagcccccgcccacatgtcacgctcccctgtcttttttggacattcctacttagccacccagggacacaatagcagtcattttcagcaaggcaggaagtctcagcaaacttccctcagcattagaaactccacacactcccaggcacagagcccaggagccatggcagagtatttatttatacccattttggaatttcctgaccagctaacagccacagcgtctaattccacgacatggagctctgtgagacagcaaaatcaccagtgaatgacactgtgcagcacagatcttaaggggggggcaaggtggacctccctcctccactcttcaacaagacaccctccctctctgcaaggctgtattagaaatggagtttcttaactccaggaagagagaaaagcagccaaggttctgtccttcttctctcttccccagctctctagtcagagggaggaaggttcattggtataatctgagttacggggcagcagctggcttcaaagaaagtgatttggctgccccaggctgggctggagactccatgaggatagtctgttaatcctgaaattcgctggagaaaaaacagtcccaccattttggccaaatttaagcaagcttttattaaagtgttagatactgatcaagatggaacttggtcagaaccaccacctggaacctttccagctgggtggcctcttatagacaaaacccacaggccaccctaaattcctatgaggttttgttgttgttttctaagaaatacaactcccagaattccaggaagttacctagtctttatgcaggtggggcttacaagctaactttgggtctaactaacaattcttatttaatgcaacttggaatctgaaggctgaaaatgccctttgtaaaccacagcctctcccattaattctgggacattctgtgtggtgtggtggcatcaatggatgagcttttgcttctgtttttaaaatgagtacatttgtgtccccgaaatgatttaagttcattactgcaaggtagtgagggaaggagggaggcagacagaggacagaaggaggaggaggaagaacaaccaccactacctgtctcaaccaaagcatacaggatagatgtgaccctgtggaaggcttgctgaattctattagagcactaacaagagaagccagttccaaacaagaccacagagatccccgtgattggggcagctacaaagaaagctgtgagcttttagaacttacaggccctgcccagtttctctgctcactcagaccccatgcatgcccactccacccccacccccagccatttgcctttccatccatcctctttctagccgtgaccacactgggggctttgtgtgtgctcatcttcccagcattcatttttctgtgagatgctaaaccttttatgaccaaaaccatggcattcacttggcccccttttataccaaattaatcaactggttcaaagaaaaatacaacatgggcaaagcttcagtgctgttgtggaataatcctcttgcacactacaaagacttgtcacttgaattggtttaataaaacgctgattggccaatagccacacaggaagtatagatggggctaccaagctaaggatgatgggaaggagaaggaaggagcaaggagaccctggccagacagatgcagagagaacaagatggcctcgtggcagagggtaaataaggagtatgggctaacttagaaagtaagagctagctagtaataagcctgagctatttggcagagaatttataaataatatcaagcctcgtgtggtaatttagaagcagctacagagatgaacaggtggtcaggacaagaaacttctgcctacacagatttgaaatatcaagccccaataattctaagttactttactcaacagcacctccattagggtaagagagtttagtggaacctcttcatttcaaccccaacccccattttggacaaaaaaaaaaaaaaaaaaaagacaaagtgatacacattaaatgtgaagttagttatccatcatcaaggcccagttttaaaagatgcctatcactctaaatgtcttaacatttgctttccacaaataaattggcttctatttttttatataataaaattctgtattatagtcacattattttagtcaaagctaagtattaatatcacaaagcctgttactaagaattaaactaagggggctggagagatggctcagtggttaagagcactgcctgctttttcagaggacctaggttcaattcccagcacctacatgacagcttacaaatatacctttacaccaatgcacataaaataaagttaaactccagaccccaggagacctaatgccctcttctagtctcctttcacacacacacggatgtgcatacatgcaggcaaaacaccaatatacataataagataattaaataagaaaatcatcagaatatagcatttcttgatcctataaaagcatttggctgttttttagataaacattgtgctccagtaagaatctgatttagtatatagagcattaggcactatttggcttctgtggctcatatctgatgctatgcagtcagtcacctgtgtgcatctacatgaattctggcaggaaaagttattgtatgcaaataaatgtctagtcttttgttggaggatgacagagaagttgggaagggaaactcctgagaaaacgagttccacttgcctggaaaccatcagtcacaaaggttcccaccgggggccattttcatcaccctcttcagacagagcaagcaagaaggcacagagctgaggggaggagaggactcttgggctgcttctctgacagctggggaggagccagaaaaagtgacctttctcccgaggagaaaggtccctagctggtgtggtggcataggcctccacggtggtggtatgtcacagcaaaactgtcttctggttttctacccctcatcaacagagaagagcgaagctgagtgctcacgtgggtcccatggtggacacctcaggatgcctgttacctccttcccctctcctattccccttcttgctaacgcatttcagagccctcccagccgcaccctacagcaggaacaaatgcactagttgtcattcttgcaacagcctgcccacatgcttcccacctatccccaccgcccaccctctgtcagtctgccatcattcaccaagggctgaagtacctggccaagtgctttctccatgtatgacctcatccatcagtacagcagccctgcaaagcaggtgtgagcatctctgattttcacagacgagcttatgtcacacgcacacagtacccttgtgccttgacactatatcatgttgcccagccagacacatttcatcctgcagcttttctgggggcaaagcgggtctgggcaaaggatctggcatcttggaagcacggggaagagtaaggacagacagatttcttaagagaagttttcttccaacctcagaaaaagaaacttatgatctaatacagccacaaaactaaatattaactgcccccctccactgcaaaacaaaaaacaaaaccctctcaatcttaggagttaaactgtgggaaagcatctgaatatagtgtcttgatgctgtaaaaaaacattctactaaagtttgacacatcgatactgtgttttggtaatgctattttagggacttgcatatactatttcttctctgagtgagggtcacggcttatttttctccagaaaaactcttctcattctaagggccacctataatatcagttctgggggttgggagtgtagcccagtggtagagttcttgcctagaatgacaaggctctgggttcaatccctagtagtgaaaataaacacaaccctccccctctgtcatggctagtttttatgtcaactggacacaagcaagttgtcactggataggagggaacctcaactgagaaaatgcctccataagatcagatggaaggcaagtttgtaaggcattttcttaatgagtgattgatgggggagggttcagccctttgcaggtggggttacccctgggctggtggtccagggttctataaaaaaagcaggctgagtgagccatgggggcaagcaggtgagcagcacccttatgtagcctctgtatcagctcctgcctccaggttcttgtcctgcttgatcctgtcctgaattcactcagtgatgaactattacccggaagtgtaagtgaaataaaccctttctctccaagttgcttttggtcatggcgtttcattacagcaacagaaacctaaccaagacacctaccccctcactatctcccagtgccccgtgaggccactccttatccccttagcctcctctcccaccatagcactcagagaagcttgcccctgctctcatctgggcatatcccttatatcctctctataaaatcacagacagctcttctgtcctgtccatcatagacagggctttgtccatccgaggtcctccagtgtacaggacaagttcaattccagcccttctcggggagcaaaacaagatatttatttcctttcaaggtgtctgtgaacatgccaaccactcagcccatgtcctcatttcagccaggcaggactctgggcacaaagaggtgccagtaactgacttttgctctgtcattcaaggagctggcaacaagcttggaacctccccaaagttctcagtccctgtacactaacaagctaactccggctgttgttagatgttgacctccacacccaccatgaatcagatctcccggggtctggcactacttgggcaccagcattttcaaagatccccagtgattctgtcctgcagccaggagtgagacgaatgcaaaattctttttggcttctcaattagagccgatttaacacaccccttaaacaactcaagcacctgtggcctaggtcaggaactttctgagtcaagtgcctgaactaaatggaaaggggtgttaaggaaacgggggagggggacccagagagcacctgtttctttctctagtgactgtgcccattggggatgtccatgttcagtgttgccatagcttctgactttttattttattttttttgtccccaaagaggctaaagcaattggtatttttatacaacatggagcaatttaaaatatcctggaaatgaactcagatgaaaacaacgggttggagaaacaggacattatgtcttccaccatgtgtcctaggcaaggacacccaatacccctctgttccaatttcattcctgtttctgtcactttccttattctgtcttatccttcttgccccctctggtttcgtgaagctcaggttgcccttgaactatgtagctgaagatgaccttgaacttctgatcttgtttataggcacagcgccatgcctggtggtgctgagctttgaacatgccaggcaagcactctaccaattgacctacactcccaaggcctcttttttttatttgacagtgattttcattctttttcgtttttcgagacagggtttctctggccttggagcctgtcctagctcttgtagaccaggctggtctcgaactcacagagatccgccagtctccgcctcccgagtgctgggattaaaggtgtgcggcaccaccctcagcgtgattttcatcttataaacccattgaaggtaaaaaaaaaaaattatatatagtctcaacttttaaaaagatttaattcgttgtatattaatttggccatctttcacatttaaatttagctatttagctaacaggatgttttattcttaaaaaaaaaaaaaggaataaagacaaatggccaaaacaacagcctcacagcctcactgccatctcccttgtgtactctgtaggactctactgacaactgttcatccttaaagggacaggttggaaggagaactcactgcacttcttctcggagtgggggacagagacggacagactaggctgctcctgctgtattggggatttcctctgaacactcaaatctcttattgtacttttgcctttcctctaccatcaggctggtgatggagtgtgggtgtggctctctgggtgtctggagaactgcacagaggcaagcagtgggtgtagttccttcccacagcactgatgtgcctctcctcacctctatcagcaatcaaggggtggtaggacttgcagaggattagagggcaagtcagcaaggctctgcaccctgttccttctgtggggtgtagaccttgctccaccctgggtgttggaagagggctcttttatatgcctggattagcaagaccagttcatgagacctaatgtaaggacagactttcccagaagaggccacccagaatgcaacaggagaagggtgtgtcctagcagcaaagaggtgtggtccttctcaggagagtgacagaggaagaggatgctatctcactgtactatctgaaaagacaagaatgagaagcctgttcattttactgctttttcctgagcaggggcctcagctgcaggcacactgggtttccacatgccccccccccccactcccattattctcctcattagattcaaggaagagatgtggctatgtctagccaagatttaaaagtcaacattttagttgtagtttatcttttgacttttggcagcactgaggactgagggtcttaccagcaaacattctacccctgagccaaagccccagccttttgttttcatttcatttgacacagggtctcctaagttgttcgggatggccttcaactgacttggtagcctagaaaggccttcaatttgcaatcctccagtcccatgctcctcatggctggaattacagcccatgctaccagacctggctgaaatcagcattttaaaaagtcaaatggcaaaaatcacctatggggcgcagaaataaacgatttaattaacgtttatttaaaataacatttaattgaacatttaattaaaaccttaaacattcacaaggactgccttagaagctgtgaatgaacaatagggactatatttatttccttaggtcttaaaaaagatgtacagaggctatcccaagataacggtgggccagaagtagggcagaccacactcccagaatccccagctcaggtctcacccacagttccaaggagtccactaaaccaagttaaataagcttgagcaaaggagtcagttggtcctttgccttttccctccagccaggttgtcaacaagcatgaaaggcgcaaagaaagaggccatgggagctggagagaacttcccaaacagcctctgaaaacccttccaaggacagccattcatcagactcttgaagcactccacccctctctgcatttagagtttccctgagggtgtgtgtcactgaagccagcctttgagtaaaggatggagagaaagcagacactgcaacctgaacaagaggcggaacggaagttagctcatgtgacacagtgaaaaccacctgtttggttcacccaggtagacagaccaagagactccggagaacagactggtggacaacatgctagggctggaacgatgtcaacctggcaagtggcaggggccatttcagtcccacaattctgctttttgctctgaaacaagtgcctgaacagggaatctgctggtgtacaaagccagagaggacaagtctacaatgactagtatatgattcctacctcttgttgcagatgggtgagacacacaactgaggcacaagaacgaccctaacactttattgaaaacaggtgatggcaatcatttggtagaaatccgaaatactcttggaattaagaaaaggaaagatgaagagctggagatggcttagtggtcaagagcccttgcagctcttccagaggactggagtttggttactagctctcctatcaggcatctcacaaatgcatttaactccagtggcagggcatccaacacaccctccggactccaagggtatctgtctacacacatatccatatacccacagacatacagaatcaaaaaataataaaaagcatcaagaaaagagatgctgacaaatgatttttaaaaagaagagatgaattccacaggacccatcaatgagtgttgctggtagagcagagtcatggggtttgagagtcaggaaaggccttcagggccaggaccggtgcttcaagtgaagccacaggctggggaacagcactgggacggagcagacacccctccctccctccctccctccctctctctccctctctgtctctctcttgcagttgtctggcctctcgcttcctcaagccccagaaaacccatcgtggtttcctcaggcaccaggactaatggtgacagaagcagacaatgctttatgtcaaaaccggccccaaacaaaggttcagcgttaagaatctagttctaaagttagtggaggaagaagtatctgaggagacagaaaaatcaaagagtgctgccaatcatacctaaccaaacaaaaccacaacctagtaagaaaaaggaagaagagatagcacttttccagggtcccggccagctcatcaccatgcctctgccaaatcatctctgagcgggtattttaaagtgaactttctgaatttacacatttctgcagtttcccatcagtctgcaatacgagtccctaaacaacacttcaatttaaattcaccactaatggcaaggttttctttcccaatgtcatgctgtccagcaaataccaaagaagatttctacagaggaaaagcccctggccctgaaatccctttaaccttctagatgtctattttgggattttttttatttcaaatcgctactctgcggtgttgtgggctctaacagctattttttggtgcccagataaagccctagctatgccttcagacgacaaatagctacagctgtttctgtgactgctgatagggtggggttggagacacatgggctcactgtggcccctttgggataaacagagaggtgaccagccctaaaatacatgacacactggggccatttccctcacacgtccctggtgcagatttggaagctacacagaacctggcactaatggaaaaaatctggtggcacagggcttcgtgttttgcaattttttccctgtaagctacattgttggaatcgtttcacaggcgaaccgtccctcctcccccactggcctacagacttccaggtctccaccctggagtgttgtaaatgccagtgcatcattaggctgattcaccacttgcaggccgggcaccagccagggtacatgctacctaaacccagaagatacttcagtctcctctgccacggcatggaaagacataccagcctttgtcttcagttgtcggggagcaggctgtacccccaagtgttcctggtgtgtccctagttggaatacagcaccccagcccatcaaaaacaatggaggatgagctgacacatcaatagtattacaaagatattaagcaccaggtttgcaaaccactggaaatgcccggtcccccctccctcccgccatttctagcttgaagcatttgtcccctttcttgcaggagactagaacacacactgtagcagagaaacaacatgtcctagactaatgggcagctcatacaagagaaaagggctcagaagatgacagggatgggaaaagtggatgagtgtgctcaatcgatatttttacaaaactttctgaaaaggtgacgggatttatcacctcaaccaaatgttatgtaaatatatccagaggccatggttctacccagcaaggaacatttatattttgtaattttcttttcttctttctttttctttcttccttccttccttccttccttccttccttccttccttcctctttttctttggtgtgtgtatgcacatgactgtgtgtacacttgtatggaggtcaggcagtgtctccctctaccactttccacaacatacatacatgcatgtatgcatacatacatacatacatacatacatacatacatacatacatacttgtttgtttgagacagggtttcactgtgtagccctggatgttctggaactcattatgtagaccaggttggtcttgaactcacacagctctgcctgtctctgcctcccaagtgtcaggattaaaggctacaccaccaagcctggctgtgttgttcttttagacacagggtctctccgtgaaatcactgattggctacactggcaggccagcacacttcagagatccacctgcctctgctccgccagagcggatatctgcaaccacacctggcttttacatgggtgctggggatctgaactcatgtcctcatgtttgtgcggctggcactttacccactgagacatttctccagccccagagagtatatccaaaacacaaaagatcacttggagagaaaaagcttcttcaatgacatgaagtcacagaaaaagaactcagtgaacacagtacttgtgacttttgacagcaaattgcttctctgcatacttacttccatgaataaaggtttatcggctgaagatgtaacaaagactacaacccttgacccaggtgaaggaactgccacaggatccttcaaatttggcttacataaaataagatagagttgggaccccagaagtttgattttccaactaagttaaatcctgaaaactggacagctagccccctgggaaagccttcctgcctatagttctactttctatctactgacgagagaggactgaagaacaccacttagtctgattctaagaactggttcttagaactgttcagatgaggactctggcacctgtatttttaaaaatcctcaaaatagaagcataattatttttaagtggggcgaccacttgtctgaacagaactcccagctgagatcaccagcacttagacacaaatgggtcacatattattttagtctttctaataaactgtatagccccaaagctgaatccaatttgtcttctaaacaccagcgcattttccctaagaaatatgtgaatgaatgagctaatgaacagctcactcagaatacatttcacagagaagccaagaaacaaaaaagaaaatcctacctcatttggcctgagaatgtttgaactcagggtctcatgtttgtacagcaggcactatacacactgagacatttctccagccccagagagtacgttcaaattacaaaagatcacttggagagaaaaaccttcttcaatgacacgaaatcacagaaaaagaactcagtgaacacagtacttgtgactttcgacagcaaattgcttctccgaatgtctacagcagtttgaattaatcctatgacatctgattcccagatccgcaataaagtttttatttgtgatgtctaatcaaggtaattttaatgcatttttccagaaaagaataagaatttattgcttccatgaatctaagaactatatgtatattcttcatgccagatcaaatcaaacagcttttttacaggaaagaatccccaagtagagacttggagcttttatcaatcattttcttccaacccacagaaacccctgaggagatggtctgaaattctccaggacacaggaggaagaaggcaaaccctggaaaaggtgagctgtccatggatggattcctctagcccactggagccagggaggaaagcaaagacagatgtggaagtcataataaatggcaatactcacgatggggatccctagagtgtggaattcccaaaccctggtggcaagggctatgctggctctgcactggcttcctgggctctcagagtcaactcagtacaaacctacagctcaggctttcttcgccttgccccgggctcctcccaaggaggctggtagtcaccagtcccagcttagctgcagccctaatcgcctgcttgaaatctgatgcttaacccattaaaactgggcaagccttagagaaagaatgcttgggaggtgaagctggctacaggttaagtctgaagccttacaacaggcaagtcctgagcagggagcttcttccaagcctctccaggggtggggatcaactctagggttctgcttagccacacaggtaagactccaaaacccagggtcttctatttgcaactattgttgacattttaacagttaaaaaattcaaaactatttgactctaaaaaaaaaaaaagccttgtcaaagaccatttctataagaaaaattattttatatatgacctttggtgtggaattagccttcaataatttatatctaagttttattaaaagctgaaatgcacaatataattacatccaataaataaacacatccaatgctaggaaggaagttcgtggtacaataaagaaatataaggctttaaataggttaacttaactcaatgaaacaatgcacattaatgtgcattaaaaaagtaaactattagccaggtggtggtggcgcactcctttaatcccagaggtagtcggatctctgtgagttcaaggccagcctggtctacatatatagagttccaggacaggctcaactctacacagagaaatcctgtgaggggcagtggagtaaactatgaatacaacctttatcatacatactaaaattaaagaaaaaaaagcctattactataatctccatcttcaggacatttttcttttaaccctgcactccccaggtgttaataagtttgctgagatgcatacatctcccttgatcagatcttttatacactgtcaatgtcaacacaaggcagacttgccttagccactgactcactgtgtgagcttcacgagttgtgttttgtcatctgagaggaggtaagaggccagacaacagaaataaaagagacctcctctagctcctacctgtgtttttatattaagaaagtcagttttaccctcggctttttctgacagttgatgacactacttatagcaaaatgtagggctaaaaaagaacacacatcgaacatcctgttacaaacggaatcaagagaccctgggaagtcacagagtacagtagagtttaaaggtagtttaagcttgcctgtgggaccagggtaactggatggcaaggctagaactcaccatcatgagcacacggcagctctgaggtagcctctgtgaagatgatctcagcaaacaccagtgattctaggcaggctagtcaatgctgggtagtgtttaaacttgaaattccagctgctaggctcaccttcagtgggctcagagttctgtttgagaaatgtgcctgcccagaaaaaatatttacacaatccagagtgggctgtgggtgctgcagctcgctttgcctgctctgcaggagtcctgggctcctctgcttgaccccggccttatcaatgccctttgtacctcatttgagatcagcatagagacaaaatccacagccaaatcactgcccagggtaagcagactcaagacctctaacagttactgaggccactaaaaagccgtgctctttagctgtttttgtgaaattactctcaggaaaccatggaagaggagagagatggcaaggtaagaggaagctctctgcatcattgtcttcaatgagggaagatgcagcaaccttcattccaaacaccccagccgctaaactgctagaaatatgtccaggaatatcaggaagctgtcacaaaggtttatttaaaagctattttccatgaagactggacagaatgcagagcatgttaaaaccaagggctgtatactaaaatgtatgaaagcttactgaagccctaagtttttctgaaaaggaagagaaaatgctaaaaataagacctaatatgtgtttgtaagtacttcccccttctattttcctaacaatttaagaatgttatcaaattaattaaaaaaaacaaaattaaaagtgattttattttatgcttaggagtgtttgctggcacagaaacgtgtgcaccacttgtgtgcctagtgcccacaaaggccagaagggggcatcgataagatcccctggagctggagttatagagttgtgagctgtcatctgagtgcttggacccaaacccaggtcagcaaatggtcttgaacctctgagcatctctccagccccaataatttaaaatttttaatgcagtcagtaaataatgaagcagacatcataagtagacatctgaagaaagacatacagattgacaagagggagaaaccataaaaggggtgggagaggcaactaattaataggcaaacataaagatggtaacaatggccagaaaaatcacttaactatattcatccatttaagtattaaatgagagagagagagagagagagagagagagagagagagagagagagagagagagagagagagaacacatgactgcaccaacatatcacatatcagtatctgtcagggttccacatgagggcaccagagcaggggcccatgacagggacaacagggcaaggacatctgactaggacttgtgccttaaaaagtgttcttccaaaccaggtataagggcacatgcctgtaattccagcactcgggatgagagaggactgagtttaagcacagcctaggagaccctgtctcaaaagatccacaaaacaatgcacagaaaagttcacagctttgcttacttttttcctcacacctgtcttgtgaagaagagaagacacgggtcattatcttcatctgacaaatcagccacttgttatttggcttctaaaggaatcctaaggtctaattaaagtttcacaacattaattagtgtttagagaggtatcaatcagtgtagccagtttacgacacgacttgggaacttgggtgaagagcagattgtccccatttcaagaccccaaaggaatctagctaccttcctaaccaatgatccctgtttactgcctagcgagttacagaagagtccagagcaatcttgatgagacaagctctaagagcagactctgcagtcaccagtcatgctttagacagatgcatacaaacaactgtgccaggggtcagaagtggagctgaatctctgctaaaaagagatagtgtcatgacgacaactgatgcagagaggggtgagtgacaaggagggtgatgcaagtggaagggatttgggtggggcaggctggccaggtttagcaagccatagtagatcaccggttaaatgtgaacctcagacacacaacacttctgtggtgtaaacacatcatctattttagatagcatctctgcccaaaggagaccctggcttctactatatacaatcccggagggcagagattcatgcctgttttgttcattgctacatccctagtacaaaaacagtacccagcacatagttggtactcagcaattgctgtgttctagcagggtttatcttaagcgggacagtgcaggtagatgagtgtgcccctcacataatctttacctctgtgtcagaaccatgtcataaggattacttataaattacagcattaatgctcttatttaaagtcaacaccctttgcccattatatctcaagggcttggcggagaagttggagttcggaagacacaggaccactccttacccagcttaaaccccagtgtcagtgtgcttacatcttacatctaaaacttctactaaatggcccaaataaattagcctttttctaagaggacaaatcagtaactggcccacactagttgccccccacacacacaccagattcatgatgaatatgaccccctcagctggatcccataaagaagggagagcgaacactgggacacagtcacccagaggcatgtcacctaactgcctggtacaagcagcacaggatcagatggataaacaatggacttcagactgaccccagggtgacagcttggacttggtgccactcatcaggacgtggtcaggaagcccaccctgcttcagcttgccctggtcgtgaatcttatttgactacctgcaccacattggtaccacccttgcctctgccttcagtaaggccattctgtagcctacgtatcattatggtatgtgtgatgtgtgaccttaagagttaatgagacgggaacaaaggaaacttagactgggaactgccacaccatcaagtgaagacaaggtcattcagtgaattatagacaacagaactgactgaattatgaattactgttactcaataaattctgacagctgagaaacaaacaaatgcatctgggctctgtttctgttcactctacccctgtcccatggttggtctcatcaaacagaactcctaggaattgagtttcaggatcaaaactggttgcccttcatctaatgactactcagagcgagttgtcttatgctcagatcagcattcaagacttttacatttctctctcaacacgtcagcagaacttttaggtaagaattgtcttaaagagaaaaaccaaaggctggtcagatggctcagtggggtaaaggcacttattgccaagactgatcacctgagttcaaaacccacatgaaggcgagcactgatccctgcaaagttgtcctctgatgcgcccccctgtcccaaatagtgtatatgtggggtgtgtgtgtgagtgtgtgagtgcgcgcgcgcgcgtgtgtgcattttcaggcaatttttctatgaagttaaagaagaaacaacttcaacaagacagaaagttgctgtgaaatcctagttctctaggccacttactattatctatcctttactaaagagaaataaaaaagccatttgagcacagatatgcccttctttcctccctctttcttcctgtcatcacagcacacttacctgcaccatagccattgactttcgtagtataagccatgctggctcaaattcgaggacggacgaagcaagcagtgaggatttgtgcgaatttcatgcagcaaattcccaaaggctttcgacctgaaatgataaagagggccccatcagaaccttcatgatgggtagaaccatagaccttggtttctgtggacagaggtgactgcaatggagacagactgaggggccaggtggtggctgcatgaggcttggcctcaaagtggctagaggaatggcatgcccaccggtctcagcctactagtgtctagacctaaaaaatacactctggggagagaaagctagctcccagacactgactacttaggaagtaggacacctgacacatgtccctcttcagtgctctctgtatttttaattacatacaatagtttattatataagtgtgtatatacatataaagttttgaatctcatctgcttttctataagctggttcaataatttcatttatcaacggcaatttcaaagcagttcctgcaccagatgccctgtcctttataggtaaactctgtataaattctttttagctatcaagtctttttcccagtcccacgtttcttctatgcagtcactttgccagaaagccaggaactcatgtgagatgggagtcagagccaggagaatgggtacaagttcattggccaggtagctacacaggccagcagcagcaatgagaaaccctgcctctatagtaagtgctcttctgacccccacacacactcatggcacacgtgttgacatgccacacacttaaataaataaaaaatgcaagttagcaataggtattatgtgtctgtgtgtgtatacacacctacacacccaccccacaaaaaccaacatgatattaaaatgcagagggcagccaacattcattaatctctaactgctgttaaactctgaattgtcacatgcagcagtacaccatgattttaagtatcactgatttaaaaaaaaagatgctaccaatcaaatcctgaacctgactttgtgtttttttaaaaaaatgtgtgcttgtacatttaattaaaaatcagaagtaaataaacaaggatgtccattgtttttgcccctggctgattgatgcactgaagaatgatgctggctccttcgttacttcgaccaccaccaccacaacaatattaataataataacccaatgtctggactcatcttttcatttgggcgttatttgctttgaaaggggaaatgcaagaatgtgactcccatgtaacaggcaactctcaggctccttccaaacacacaggatgttggtaatacttttaagtaagaatgaagggaaaaaaatggctgatgacagtgatcacatacggcaagaaccgttctccttagccggtgaaattttcctcactgttcatagctgcaaagtcaaaaggactttttgttgttgttaaaggctgcttctgtcaggcacgtcccatttcacactcttccagttacaggggaatgctatggtcagaaaccagatagtgagccttccactcccttcaggttcccagctctgcataccagggcaagatggctctaatctctctgattaagaagcaatcacccgacttccctgggaaacaggagcactgaacttgcaaggcattaaactgtgcaccatgttagatggctaggttaaaaggcaagggacagagagaacgtcagctttcaagaacagaaatgactgtccatgtctgccagttaaggccaaaaaagaatgtggggccaggaaagactggaggggaggactgggaaaaggagggggtcaaggagagaagccaagcttctagaatcttcaattaatcacacttctaaaacctcaaaaacctcaggctgaaccctgtttgctggcccctcagtggcctctcagatttgtactctagtgtcaattcggagaggctcgtaaataccaccatttaacctattgagggtaaacagaaggcaagaagagacaagctgcggtgtcaggggtgaatgaagtatgtgtcaaggtatttgaatggagatgtgcccagagtcttcccagccaagctcacacacacactcgttactgaacctctctcacctggcaggagatctttatctcagatccaaattggtctctcccaccctatcctaaaacagaacaatccaataaaaagaaggaagcctaaaattaggagttacaagcatgtcacaggtaaaataacaaggccccctgtcacgggatgtggcaagctggcagtgcctgtgttgagaacagctgtaaattgtggacctgtctctcccaggtattatccatctggcagatggctttccagttgtgccaacttgctcttcctcatgaaatgcagcccattgaagaaagcagagagtggccacggtccattcccttgttgcagctcaataaaacatttctcttctccccggaggagagtgcaaccactaactccagatgatgcaatcatggctgaattctggtcctacaaaaagcatttcttatggtttgggaaaatgcttcaaaggagaaaatgaagattgtgccttctctctttatttccagagactggaaggcactgaagatcatgtccattggagcccaagtgtagttcagtgaacaacataaagagttgacctcacaaatacgtttcaatagctgaaatgaaacacatatgacaagcgacccaatagagttctgtgaagagcacaccaatgaaagacagcagttggagaaactgaggtgcacgtgagcacacacacacgtgcacacacacacacacacacacacccagggtgagctctgtaaaccatcagctgtcaccacactgcttaggaccatgatgctgatggacaacactgactatagtgctgcagctaacgtgagttcatcccttgttaggatttcgtaaaactgaaacgggaaacacctcacctattgtatgatgcaccaataagtgatgctgatctgaaaacatattttactaattaaatgacgataaaatgataaaatgaccggggctggagagatggctaagtggttacaagtactggatgttctttcagaggacacaggttcaattcccagcacccacacagtggctcagaatcatctgtaactccagtcctaggggatccaccgccctctcctggcctctgtgggcattatacccaagcggtgtacagacagacagacacacacacacacacacacacacacacacacacacacacacacacacacgtgaaccactgatacacataaaaatttaaaaaataaaaagcttactaaaactatattggggctgatgatgaggttaacacatggtggtacagcttgtgtttagcatgtataaggtcctgggcttgattctcagcaccataaaaaaggaagagaagggaggagggggggaggatggagaagagaagaaagaagagggattgcattcacttataagacatatccttgctctgagtgttaaagtctgaaagaaatcttaagaaatgatgacattatgatgcattctggactgatcaccttgttttcaccttctaagataagaaggtgaaatccattcctccgttttacaagtaccaaaggcttagaatgacccagtcatatagctacatgactgagcagatgcagctgagctggctctgtgcttatgggattagcagcaagagcacaaggctttgtcacaagagaacatacatgtaccaacacgtgatgtccctttcaaaccctgcacagggatgcacaggctcagtgcaacgatgctcgactcacaccgcttttaggcagaagtgtaaacgaagcaagatagcaagatggcttaagacaactcagaaacctgaaggaaacactctaccaaaagcaactgggcacgacaaatatctttgctcctgttttaaaagctgcacatcacaattacttttaagttagtctttcagtaaagcctccaaaagcctaacttaccacacacatcatttcaaactgtctacacattcctattgactctacaaagacagccaactatctaattaatggtaacaattaaaagttatgtcagtgtggccactgttcaggatcagactctctcccaggggtcttctgtgctcactggcttctaaccatattgggggaggggcaggggatagaggtaatggagtaggggggtgagatataccacccagcccgcccttccttgttttatagccatgctacctagtatgatcgaacttcatggagcccctagtctacagcagaccattttctttgtgtgggagagggaggaaaggagggatctttactatggatccagatataaattagaatcatacctagatactgactttcatttctagcggagaaagaaggctggggtttggttattggggtattttaggctatgtctgtctacacagctagctatatttgcagtttcatgtgttgagtaaatcccagataaaaggctgaaataggtgtttatatcacagaaaccaattaaaatgcagtagataaggagaaaacaaaataagcaccagtgaataagttcattcattcattcattcattcgttccgtgtctggtcatcataagccagtcagattgtgaacctcgagtacagactcattcattcattcattcattcactgtctagtcaccataagccagtctgattgtaaacctcagagtatagcattgagcaaagcagacacacacccatccttttctccgaaataagttaactgaagatccgtgctttgggaacaaagaactcataggttcccaggatgcttaatgattggctgtccccaaagttcacctttctgccttacttgaaaagttcccacggtcacatctgccgcctcatgtacttactttgttccctcgtgggtgtgggtgtgggtgtgggtgtgccatgccctctcacagacccctattgctcatccacatatacccaacactacaaaaagacactggtatctttcccggagtgtgtaggagctctgggcaggctaacgccacctggaagcctccagatgttttcagagtcccaccttgggtctgctccagctgggacagacacggcttcctgtacacataaatagaactaacgcttgctaagtttcttcccaggcagagaagagagaggaacagagagaagagagagatgggaggtgggcagggcccttttaaaagggaacgtagtgaatgtacacaggtgatgctcttagtgactgcagctgagggtgccggtacagacacctgaacgctaacaatgagtgagcaatgggtgggtctctgactattgtgccttctctggagcacttttccttttttttttttttttttgtgtgtgtgtgtgtgtgtgtgtgtgtgtctgtgttgtcctactccgatgtgatagtttttgttttatcttatattactcttagatgtctgttcttttctaattatcgacagaaatgtaatggatctggatgggggggttgatggggaggaactgggaggagggaggggaaaccataatcaggatatattatatgagaaaggtattttcaattaaaggaaaaaaagaaacgaaaaccctcagattgtcttagtcatggaccaggtctctaggagccacacgcagagatgcacactttaactcggttctaggagaccccgatgtacagcagatgttcttaccaccacagcttgacaggaagagtcaccaggaagaaactaagtttcaaggctccaggagccaggaagggtccaggattttaactcaatgcctcacagtggtttggaagctatccccaggaagcccaactttcaatggtttgtttaaaccaatattaaacctcaggatgtgataacagacagtatcagatactacagggcaaacaaaacaggctcgttcttgtgcttctgaggcttacagaccttggaagcaatgcatcaggagggaaagaacactggatcctgggacctcacatcgatgatttcaccttgacactatcaccagcctctgggttcagaaaggctgggttatgctaaagagaaatctcccagggagggatgtgtgtgtgtgtgcctgtgtgttttccaggaacaaacaagttgctacttaagataagctttacgatgaagcactttataacctgctacctgttcaaagttctcagtgtcaagcaaggcagaacaaaaccacaaagaattatcacttcacagaccccacagaagcccaaaaaggaaactaagtttcaaggctccaggagccaggaagggtccaggatttcaatgcaatgcctctcagtggtttggaagctatccccaggaagcccaactttcaatggtgacatcggtatcgtagtggtgggcagagctgtcttgcaagacaagtgacgctaatgtgaagaaataggactgcgtgtgcctattggcaaaattgaaaaatgaaaaaatggtacagttataatggaagagtgtatggaagcccccccctcaaaaaaaaacaacaacaacaacagaaaatagaatcactctatgatccagcaacttgcttccaaaaactgtccggaaaaacctgaaccccacgcccattacagaattagtcacaatatccagcatgtggcaacccagaagcccctgacaggtgggtgtacacaaggtctccccgtctttaacaaaggtgaccctgtcaaacactggctaaacaactgctaagcatctgaggtacagaaaccttgaaggtacatgcttaatatggtttcccagttcttccctgtgcttgcatatgcctgagtttatttccaaatgttactttataatacataacattgtagccgggtgtggtggtgcaagcctttaatcccagcacctgggaggaagaggtggggcgggggcagatctctgagtttaaggccagtctggtctacagaatgagttccaggccagccagagctaaacagacaaaccatgtctcaaaaaactaaatacacacacacacacacctaccccacatcacaccataacacaagctagctaagacaataactattttattactggttgcatggaattctttcatatttgttacatattttgtttgaccttccttaattgctaaatatttagagtatttcactttgctacattttgacaggttgctttgtgtaatttcccattaatttcctataaataaattcaagaggtgggtgaacaaggaaaaaaagcatgctcatctcctacaaatatggacagcattgtgttgttcttcagaaagcaaaaacatgagagggaatttgaactgagttccttttccaattttattgctttgcacacgatgaacatatccaccaaagagcataccgaaaatctctctgcaaagtagcaaatgtgctctcagtaggtttgaatctgacatgacatttgagctgctccacgccagcttccgtgtttactcttcactctcggctcagagcagtttctatctcacaagcttagttcctgtacacaacagacactgggggcaaattaacagaaaacattcagtttctcaccctgagttactcagagcgcctcactaaccattgctgtatccccagcttgtcatgtgccaatctggcagactgaaacatgaggcaggcacgtatctttatcaaaaacacagctggactcaaggaatcttctagaactgcctcttggctcctccaaacaaattctagcaagccacagatgaagttctggcaccattgtgctgtcatgtcagaatctcggattagtgtcagagacatagaggtactaatacggccaaacataggttacatgcataagagaaaaaatttaaaagtatgaagccataaaattaaaggtttccttttttaaaaatgaaaaaaaaaaggacaaggaatgtaggggaaaatactatatatttacatacacacttatctcagaagtggccttatagatgtacagacgcatccccaaagcacagacatgaatatcagatgcaatgctgggtgagtagaaacctccccctggatcactgaagcagctccggagaacagggtacttacaaatccttgtctgtgtacatgaggacagtctcacaagctagttagaagtgtgcctgggttttgttccaaagagtaaaggggatggttcacaatcccagtccacccctaggatgggggcaggagggaaggggaccttatctcacttcctcattatcttgtccctctgccccgcattcctgtcctcacagcccctgaggagccagttctgggaattccactcctaattctttgcaggagcagacacattaaagcccttgttgtcccaggtagtttctctccccagtatctcaactaatcacatcctcaaaactggggaccacacatgccatcctaactcagggaaggaacaatagcacccagggtcagagctgggtgaagcacccacttcctgttaacttgctactcatgctgcgtcacacgggcttggagtccgatggtgtctgcatccttcagaacagactggaaaccatggtttccttggacaaaaagaatggtcaggcctatcatagcaatcaataccccactcttggtaccaacttctgtcttagtaagggttcctattgctatgaagagacactataaccatagcaactcttataaaggaaaacatctaattgggaaggctcacttacagttcagaggttttagtctattatcttcacggctgaccaaaggcagcatgtagacatggtgctagagaaggagctgagagttcttacatcttgaccagcaggcaacaggaagtggtctgagacactgggcatagcttgggcatatataagacctcaagacccacctccacagtgacacacttcctctatcaaagctatgccttctccaacaaagccacacttcccaatagtgccattccttatgagtttatgggggccaatcaaactaccacacaatccctatcaaacagctccagtaactgggatcaagcattcaaacatatgaacctgtggggggtcattctcattcaaaccctccaataagataaaaacactgccagtttacagaaggatctgttaacaatggcaatcccaccttggtcagataggggtggctttggaggacacagtaactcaaaggcaaagggtagcaatttcaaaagtgatgctgaaaaaaaaggattgctagggaaacagtctctgggtccttgtcattattacagcacaataggatagttactactggggatgatagacctccctcaataaagaaggtaaaactgtattcaatagattgcttaaggaagtctacaagtacaaaattaaatttcaaaagcttttgaaaggaagcgacagttaaatgagaaagggatagaaaagatagattgcaggggcaaagcctgtgctgtttagaaatcttagtcactcagaataacttattctggtggagaaacataaacagctatgttttacaataatttatttttaaatattttctttttttaaatatctgcttatggtgtttggtgatatacatatttcccaagagtccatatgattcttaatttttctcgtttattttttgaaaaagatttatttttatttctatctatgtaatctatatctgagtgtgtgtgtatgtgcgcgcgtgcacatgcacacctgaaaaggcctctggtgctaggaacggaactgctcccttaactgcctacccatcactccaaactctctaatcaggatcttaaacttacaaaagaccaggaaagtaaaagaagatgtgatgtggtaacttcctttgtgcttagctgtgtgggtctgctgccattccttacgcctcctgttagtcctgaatatagactggactaaagactcatacatgacagcatccaatagcatctgttgaaatagctttatagctaaatcatgcataatttacttttgttgtatagactaagcatatattaatttttcccattttagttttttaaatgtgtatgagtgccagaaaacagcattggattcctggaactggagttacagttgagagctgccatacaagtgctgaggaatcaaaccagaacctctggaaaaggaaccagtgctcttaaccactgagccatctctccagccccagtgctaattttaagcattagggatctcatttctttaaatgtgactgtctgtctctcttaaagatctgtttgttttatattttaatgtatatgagtgttttgcatgcatgtctatatgtgtaccatgtgtgtgcctcattttctgcagaagcctggaactggagtgatagatggttgagctgccatgtgggtactgagaaatgaaccctagttctcggcaagagtcctatttcctttgcaaattgctaatcattatgaacatttattaagcaccaagagtatactacagtggtttctgtatttaagaacaaaacaaaataacaacaacaaaaatatgagataaacaaaaacccctgctactaactaagcttatagtctaaaataaaacacaagaattctgtatgcctaccacaaataacagtgtttaggcttagaatgtgatgatccaagtatcatacttggatctatttcccccaatacattatacttgttaagaaaaaaaaaagcacttagaaatctggtaagaacaatgaattgctgcccggcagggttctacacagagatgcccatgggctcagcagctgctatgtccgtgaccacaccaggattgccttctccacttgagtgctttttccacctgtaatggctccgaccacccccaatcaaggaataaaatgcatcacttagataaacaacctgctgtgttacagacctactaagagcaacttctgagaaatactaattcatggttttgtttgttttggttttccgagacagggtttctctgtggctttggaggctgtcctgaaactagctcttgttgaccagactggtcccaaattcacagaaatccacctgcctctgcctcccgagtactgggattaaggcatgagccaccaccggccggcttgcttaattcttgttttaaaggagaactatgcaaacagccagaagtgacacctggctgtgtaagacataccaagatggtccagcccatgaatccctaaagtgattaagatcacatcaaatgattgctctttcgttatctatttctggtgtaatacagaagaactttagcatcaagatgctagagtacacgccatccaattttagacacaattttttgttttgttttggtttcgtttctggttttttagacaatagagccacagctgaccttgaactcactatgtaggccagacagccctgaatttgtgatcctttggtgtcagcctctctagtgctaggattacaggtatgtatcacaatactttaaggacctaattcttttttgttgttgttgtttttttgttttgttttgttttgttttgttttttgttttgtttttgtttttcgagacagggtttctctgtgtagatttggagcctatcctggcactcgctctggagaccaggctggcctcgaactcacagagatctgcctgcctctgcctcccgagtgctgggattaaaggcatgcgccaccaacgcccagctgcaggacctaattcttgaatccctaaatgtttcagaataaaatgtaactcctttttacccagtttaacaggaattgacacctttgaccaaaggagtggtgctttctcacaaaccacacaaacctgaatgaccacatttgattccaaaattctccagcagacaatgtagtttatcttcaggcccacaggccagagtcccctctactccacttccctgttacacagactgagtggtatcaccatatgctctctgtgcggaataaccaggggacatggtgaaaacagatacgtggtacacagtgataagcacatcccacactagcatgtacctgttcttagaggaaaagtcaatcaaaggtagttagttcactgatgctaaaaaaattctttgtgggctgggaagatggatgagagactaagagtactgaattctcttcctgaagacccaagatggcattctagcacccaaacggtggctcacaattgcccaactccagtcccaggggatctgatgctgttttctgacctcctctggcaccagaaatgcatgtggtacacagacgtacacacagatttaaaacacccatacacaaaacacaaaagtaataaacaattttaaaagccatttgtttttcactcaaattctagtgggagaagagtcttaatgtctggactgacattttggaaggacaaacaagaccatgcacttcaaaacaaaactgaaaggcaaaacccaatctttttctacagaagcagaatggaaagagttaattaacacagaaagttataatacagcaaaggacagatttgaacacaatgacaagtgatcaaaaagatatttggaggaggtatctgaaaggcttatataagctataatataaatctttttaaaatgcatatatgtggatatctgtgaatatataatacatatatcacacagatctcatacacacatacaaatgcataccaaaaacatctgaatatgatttcaaaggaagatggatgagacagagaaatgtcatcctcctacctgacctcccaacacattttcggatcaaaacttttatcttgaaatatataaatcaataaattacattttttttctttaaaccataagattctttcaaatcatgacctaagcaggcacttgaaaattgccttccttgtgttgtccgtgtgtttctaaacaggctttcttcttacaaagttactttgttccttacaaaaacattttgacatacttaacacaaaaaaactacaaagtaggagaagggaagatatagtcataaacaggcattaacgaaacacttgcagacctccaaagatactcgccctcccaccacctcggcatgagcttctcagacaggcgggctgccaaggaggcataaaaataaaaatctcaaaataccaaaggaggcaccaactttttccatctataggagcacaaagatgtggagcaataagggggcagacacctgtttactgtgaagaacccagagcgaggtatctagaaattcaaatacctcatgctaccatgccttgtctagcatgtactactgtccctcaaggatggagaattttaccagctaattcagagaaacgccaattatccctcagtgctggtggctgaatgcaaacagaaacctggggttctgggtagggcgtccacaaaactaagcccatctgctacgaacattagcaaaatcaacaactggtttgaaactagacctgccaaatgcttcccagcttttatttgctcaagtgtaaatcaatttagagaaattgctacatagataactcctctttctaagctgaccggggagagggaaaaggggtctttgcagggaaccttcattcagaatgctgttcctttccactgatttgctaaagcatacagtgacttaactacagagttttctgaagaccagtttattctggggtccttcctgctcttaggctacagagattgtgagtcaggagacacagagggatgagaagtaaaaacccaagtgctggtgcatcagactgcactggatatattcactgagaaatccaagccagcagctaccagagttcaagctcctagtctatgagcagcaaatccccaagtaaaaagcaaaacaggctcagacagaaagcagattaatggttcctagatccgacatgtgtggcaaggctagaaagaaatggcccatggctgccaatcagttttctttttggaataacagaaacattcaaacattgcttgtggtgatggttgcaggattatgtaacatgtgctcatgttaataaatgggtggacttcctgggtggtgaattatacttcaataatattatccaaattaaaacttagggtgtggaagatggctcagaggtgggaagtacttgtccagcaagtgtgaagacttgagttcaaaaccccagaacctgccgggcgatggtggcgcacgcctttaatcctagcacttgggaggcagaggcagggggatctctgtgagttcgagaccagcctggtctacaagagctagttccaggacagcctccaaagccacagagaaaccctgtctcggaaccacccccccccaaaaaaaatctccagaacccacataaagccaggcatactcacatccttgttttaaacccagtgtcttatcattcctgtagtgagatgggagggggagacaggaaaatcttggtggcagctagcctgagatatgtgtatcagtgaacaacaaagacaacaaggggtggggtggtggggagcaagtcccaacacctgagggtttcctctgcctgccatacaaatgtggcagcacacgtacccatattcacacacagtcatgtaaaaccaaaacaaaaagccaacaaccacaaaaacatctacatttccctggtctgtaagatcagaaaggcagtagggaaagataagatttgaagagagggtatgagaaaaatcagagagagtccagatgttgtaagatgagttgagaaagcattgttcatccttctcacagaacatctctccaagcaagcgcaggctccgcctccctgatgctgggagatgcctctgacagaaggtccttaactacaggactatgtgcctacaaagtctttggaccctcaatgcctggtagagcatcctgatttctgcaggctgctccaactgtgcattgtctgcaatggcacaaagggtctcattaaccatggcacagaggctacacagaaccctaagaggcagcaagctgttcccctttacttctaatgatgcatctgataaggattatacacaggaaacaattacaccaaagactttcttttgtttatctgataaagacagcgcatagacacacacatgctcagacgacttttaaatatgtggtgtgcggctgtgtttatctcctggcattaattagcacttcccatagggattctggttttcttcagctgaatttttcaccatcactgggctaatttttcaggctgcaagcgtcattcactgatggtggaaggaaaccggtttgggctcttggcaacatctgctgaacactgacatcaaaatttggcagtcctctttacaaattcattaacactcaggcagacatgcaaaaatgctgatgtgggcccacaaatggagtttcccttcagatggacagtcaggatgagaatgagagcgagggccttcaactttacaggcgcttttgagcgcctcactcagaggtgaattttcttctaaaagggaaccacgcacactgaggttgggaggctcactgggctccgaacacctctgtctacccccatcccaaattccaataatgaaacttaactcccaagacaatggttctaagagcagggcttgggctggggagatgcctcagcgggtaagagcacttgcttgcacaagcatgagttcagatcctcagcatccacatgaaaatccaggcatggcctagagtatctggaaccttatcgggaggggcagagataggcaaatcagtggggcttgctggccaaccagcctagctgaaaacctgcaagctccagggttacatcgagagaccctgcctcaagagaataaagctccagccagggcgtggtagtacacaggaggcaaacgcaggcaagtctctgggagttccaagctagccagggctctcttacacagagaaatcctgtctcaaaaaatcaaacaaagaaggagagaaacagagagaatataaagctctgagagggagtcagagaatgctggtctctgcatgcatgtgcctgtatgcatgcacacaaatgaatgcgcgcgcacaggtgcacaggcaggcgcgcgtgcgcgcgcgcgcacacacacacacacacacacacacacacacacacacggaggtcagtcatgagggatgtgtgctaagaataggatcagtgcccttaaaaacaaaaaaggcttgagaatccaggtaggcctgtttgttcttccagcctgtgaagacacagacaacaccatccaccccatgaggaagaggccctcaccatatattgaacttccgggaccttgatcttggacgcccatgcctccggaacttgcgcttaggcactttaaatgaccccacccccagcattctcttacagcagccctggctatgacagactcctcacttggagcctgaggctcttacaggaggcacatggctgctgccctgttcaggaaatcatccaacatcaaacctacaagtggaagaaagtgggctcttgacaaccattactgccagtgatgtggatgagaagacgttcaaggggtatttaagcgaaccaggatggagtacaatcccagacaaggtcaaacagcagctttgaagaaatgctgggtaaagcaaattatttaacacccaatttggagggagtatgttttgggagtgtttcgatcagactgccacaggaatgagagacttccatgataatctgcttctttccccgtgtgttacataaaatcattctaagtcattagcttttcaaaaggtgcaatgccttaggactctcgaagatattaagtatgctgaaatcagggtttgctcaaactgcagcaggtaaaaggtgtaaactgctcccaagtggcaagcgccactgaatatcccctttgggatcgtcaaaggaggcagtgtcaatatccacattgatttggggatcagaggaattgacaggagagaattgggaagaactaagtccttcttccatagaagtcaaatttaacaagattatgaatgaaaacatcaagccacttcaaaggaaaggtagcctggcatgggcccagagcccgggaataaagaaccaacatagcccttgccaagtacccagcctctgacagacaggacacaccgggacaactcacacagctggtgccaaaatgtaactttagcctccatgcccaggaggaaacagattcttcagaagctttcttcatatgcttcccttcaacaaaactggattatccctgggccagcagagaacactcaccccagacaccttcttcttcttcttcttcttcttcttcttcttcttcttcttcttcttcttcttcttcttcttcttcttcttcttcttcttcttcttcttctggtttttcgagacagggtttctctgtggctttggaggctgtccttgaactagcttttgtagaccaggctggtctcgaactcacaacagagatccacctgcctctgcctcccgagtgctgggattaaaggagtgcgccaccaacgcccgactttctcttacttccccccacccccagatatcttcttcaagggacagatggtgaccaagcccgaaaaggctcaggctagagtcaggagggacagaaggtggaaagggctggttcagacgagtcttcagctgggcaggctgtatggacaccctggctggggaaagaaggcagtggagcaatggggctggtccagggagctcactgcccattgccgtcatggtggtgtcagtcctgtttgcaaagcctctggcccagatggtgggtctgtctgcagcctcatgctgccatgctggactggctgcagaattcaggatggagatggtatcattttgtttgtttgttttactagccctgcaacaaaatccttggagctggaaggtcctatgaggtgatagtaccctgaatgtatggagacggtcaagaaattgatacaaagcttcagttattaaggcataggctgaaaagaaccacacagtatatttcttaggcaagcaagtcaacctgcctccatgactgctctgtttataccacagagaatatctttgccaaaacctgcatttagatttcagtgtctccaatagttactgatagtatgtaagctaggacactgaatggggtgaacccgaataagatccgaatacttctgcagctactcgatcaccaaggagaaccagtctgaggacccaggagcctgaggacccatggtgatgccaaaggaaggtaataataccagcccaagtgtctgacattactgagtaaactgaatccatcaattccaagatctgctttcgaaaaaatatttactttcttaatgcttaagtatgtcttaatttaagaattcctttaaaagtctctatctaataaaaggtatctcacatcagtacctactattcgggtaagcatctgaaaagtacctagctaaaatgttccaaatatatatcaattcgtgctccagagcacacatgcatgcatgcatgtgtgttgaaactagggtctcttgcaagctaagggggtaacttaatctttacattaagccacataccatcctgttcaaaaatgtttgttttgagacagggtcttgctaagttgccaaggctggccttaaataatagctagccctgaccctctctacagggagacctgaacttctgcttcagctacctagctgaggttacagtcctgtaccaacaggcccggctaacaacaaactcttaacctaaagagatgtgtactcattcctgggatatttcttgacagagcttctcaagtgtggtccccagagaaagctgtacttttgtgaccagagaacttactagcaccaattcccaggcctcacccctgacttggtgactcagaaatccttgggtgtagggaccagcaaactgtttgaataaggacattggtggttttgaaatttaagaacctctgctgcttaagccaccaggtgccacacatcattagtcacaaccaaataaacgttgaaccatgcaaaatgggctacataagggccaccctgccctccagtcccgaagccaagtactgtcacagatgaaaggccaggaaagaacgaacacccgacagtgcctaaacaaaacaaaagctttcccatcatcactgtgagtacataacgaggctatcagggagtgtctgaaagaagaagaaaacctggaagtcgtgaacctgagaaaagatacagatgttttcctgaaacagctgataattaggcaaccggtggtaaagtgaaacaaagaaagagctgtcaaaagttgggggagaggacgagactcgtatataactggacagaataaaacaggaaacaacaaaaatattcctgggatggtgagaggcgaggatggaagtgactgtgagcaaagtaaaatgatatgtgcatcctgactttaaaattttaaaggagaaagtaaacaatcataatacactcccacaaggcacaggggcctgaagacagggccagtggagggcagcaagggctgagcattgtgggaacacagctgtgagcgtgctgaagagatggctcagtggttaagaatgcatgcatactgctctctcaggggacctaggcttggatcagggaacccatcgttgggtggttcagctataggagatctgacacctctggcctcaacaacactctctctctctctctctctctctctctctctctctctctctctctctctctctctctctccactagcaatatgtactcagtgatgggaactgagcctctctgactgctgaaatattggcatgggctctgtgggaagtagagaaatgacatgttgcccatgtagacaaagaaggaaggtggatttagccatcaaagcttacacaatcagatatgcttacctgaaacaatctgagcacaaagcttggaaattttgagattattctgatagttctgtagaggaagggcttgcatatggagccctcggcagcactctcagaacacacacctattcctacggaacagactgggttcccagactacctgacagctagttttaaatgatgcctgagtcagcatgttctctaaattgttagctatctagtgtgtactagctctgatgtatatctacttatcagaaacaatcagctaaacaataatattaaggggattaaataccttgtgcacccccaaaaagttaggggctggggtcaggagttacagggcttgccacccaagcacagggctattttggaacccagaacccatgtgcctgtacttcctgtctcagaaggcggagatgcaattgcctagagcaagcagggcagtgagaccagacataggcatgagctctgagttggattaacagaatgagtgaagtaggaaaatggtgggaacaatcccagaggcaacattgggcctccatgaccatgtgcatacactgtgtgcttatatgcatgcaaacacaaatttgcacataccacatacatatatatggaaatggaaaaatgggaaagcagtgaagaagtaataaattgtgagtgctatatttgcgtttcttcattcactaataagggattctgaatggaaagggaccacacgcatcctatctaaggactagtctagtctcaaaggggccatgactaggatgggtgaacattcccatcttggggttacattagtcttaacatttcagaagaggtctgcacaaacacagtcaaggtttgtggctctctgaaaagtacacaagaaaataaaagatttacaagtcagtcctgaaggaccttaaagtgtgactggggaggctggagagatggttaagagcactggctactcttccagaggacccaggttcaattcccagcacccacatagtgactcacaaatgtttagctccaggtccatgggatctaatgaactctctggcctctgtgggtacccggcacacatgtggtgcgcagacatacatgaaggcaaaacgctcgtgcacggaaaacaaacaaacaacaaacaaacaaaaacaaaataaactaaaatggtaaggggtgagtagagaggaataggaccctgaaacccttgttttctacattagttccactgaggatggtggccatctaatcctattctccttgccagtgaataggaaagggcaggtgactcagttctggggtgttcctgtgggtcattttccgtagctctgaaggggacatatgatgctaggtcaggatgcgatgagtagttcttctgcagccactttttttttctgagggcatgctggcatgagcaggatgggagagtgtagtggcggtgacaacttgggcggctgatggcagctctgtgccaatagtcaattaaccccaaagccgttcttcctggatttaagttataaaacagacaatctgagtcaaaaaagatttttcttgggattttacttgcacctggtacacattcaaacaataagactaagatgaatcagagtgaattctcaagagcctgtactttgaggctccagaatgcgggttgtttgctatgggaaagacttcatcatgagcgattcttatggtgaagaggggtgctgttggtagaaacttggatgggatggagaagagctcttacccaaaggacatgaaatattttataccacaaccctcttatagggttctggaagtgtgccaacagagacaagctcgacatggaatatcctaagacaagggagagggctgtcctgcctctgcctttggctctgcttaaaacccacttccaactactccctttgataaggcaccgaggcactctcctgggaaggctcaattgcagaccctcagagtagttcattcccattcacaaagaggcagtcaaaaggcagctatggaattaatttctaaagcccatcccagaggaaggctttgccttgtgccttggggctgctaaacccacgcaaggaagaagctctgaaaaaacctctaagctgctgtactctgcacagagcatccatctgcaccagttacagtaaatgaaataagtaattatcttctccatgctcacagtaattaccttctctagccagtttttaaaagagtttctatttaactttccttttgagaagaacaatacaattactacaccaccccaccccttcctttcacctcatctcttagtgccccaaggtaaagaccaattatcaagacaaataaagtgcatcctcccaaagagcaaaatctcagagcacagaacttcagtaatttttttgagtaagaaaccctggaaaagctggtggctactgacactaaaacacaaatcctgctgggcattcacttctgctgcctataactcgaccaatacctccttatacactaagggtcaaagttcacctccatcattcaagtttttattaagtggttacacaggctaggcataatgttcattctagggagagggggttaatagcgcaggctggatgcccatggagggaagagagctggaagatatcgtgacacacctgtattgtacttcacccatcagtgagctcagagctacagagatgcagaaaacagaggatcatccaaataaggctgcagacagaggaagagaggacaccgggcctctagggagtcttagagatgagtaagttggccctggaggggaggaagcaggttcttccaagaggacggggcagagcccacaggatggggcgtgtatgaagttgtgggaaatcagatatccaagcatggatgactaaggctgtgccaagctaaggaatttgtattttgaaagcaatgggaagtggtggtggtggtggtggtggtggtggtggtgtgtgtgtgtgggggggggagtcactaaaagacacctgggctcggtgagtcttctggaattgctgttctggactgaaacaaaggaaatggctcaactagagggagagaagcaagaaggccctcagctgttccaacagaggagtggggaatggaagtagaagtcagggttgggtaattgtgccccagggtatagatgctggtcctcaagataggaaagcaatcttgaatcatggggtggcatcccagggaacacccagaacagaagcctcacaaatgctggggtgctgggctgtgggttacagaacttacacagataattctgtttgctgggcacatactgcactgtatatttaatccattaccaacttgcaagttcatggtctctatctcaaatccatggatgaatctgatgcaaagcatagcgacaatgagcagaaataacagcaatacatgcacctccaactgcttatacagagtgactggtcccccaccagccagctaagtcctcactgtgccctttgttcatcttcgaacaagcaaagttggactaagctctctccagcccctctcaccttggacctgattgagtccatggtttggattattgccttttattcctattattctctttgctcctaaaaggagctgccagattccattatggatgagctaatacatgcagagcctgctcaagtatatgacatacagaggccctgggaagacaggtcactactggggctatgtgaaagcctttcctcaccctcagcccttcactgggaactccattagtagtctctttgcctcttttcaggcacttgctccccataggcacaggggctgtcactgacatgtttgtaccacagacatgtagtacaacctagagcatggtctccaggggttagagggaaccgggtatcatttgtcatttatatttgcttctgagaaagatacctgtctctcaagacatgtgtttggatatttataatctgtttggacaggaggagcaatagttaagttactgaatcagaaaatgtcacagctttccacaattcagctgcgcagatggcaaatgactatttttacagcttgtttctccattacatgcagaaatatttattaacattgtatttctgttgcatgtgtgcaaccagcaggaagacaaggcaggcagctgtcacagaggtgggggaagggcacagaagtggaaacaagctggggctccttttagcaggcaagcaagccaagcctgggcatatgaaagggaacccaggatatttgctcatctctgtggcaaaaaagaaagtgccatgtcaggaaaactgtagcagcacgcttcttaggggctggctacaagagtacctgagggcttgtgagggcgtggtcagagtgagtaggggactgtgttcattggaaaaaagaaagtgccatgtcaggaaaactcatatgcagcacttagcagacatccttttatgtaactccatcaaatctgagatgctacagatcataaaatacacattattttatgtgtcactgagaaaggaaaaacattcaaaatggagagttgagcaagacaaccctccccactgggccatctagggccaccaaaagccaccaagaaatcaactctctatagaaacaaggatgacaaggagatgtatctcagtgtgggaactagaaactgggcagacaagggaactcttctttgagaacctatctcatgtgaccaatgaccctaaggcagggaatctaatgttggatctggtttctcagcactcctggtaaccagcagaggcccaggatgtacagacaaacctgtgacaagtgcatctaggagcagagacacataaaggcagccatgtccactgcaaggcccaacctattcagagtcgacagctaagaacaaaatcgggaagaggtcaacgcagaaaccaaggtccaaaggcggaaggggatccagcaggtgacccactgaagggaacggagctggtgaggaatctacaacaaaagcaagccagaccttccagtttctgccctctcctctgattttctaacttcaagtcaggagacaagggctctccgctttagctctctctagtaacatagggggaaatgttctctaggatcagggaggaaatgtaacaaatagctgtttaaaatattttgtctatttaagaaaatagcatgtcgggaaaactgagcttgctatcattgatgtaagaggtctgaatgctccttatagattttgtgttttatttttagttagcatagggctctaaataaacaagtaaataaacccttactaagtaacaaaacacatattgttaacatcagcctcaacccagtttcgacccaaattcctcaggaggcttagttattacttattgctaaaaaaagaaagaggagaaaaaaacaaaaaaaaaaaaaaacagggctggagagatggatcagcggttaagagcactgactgttcttccagaggtcctgaattcaattcctggcaaccacatggatcacaaccaccttgactgagatctggtgtcctctgctggcatgcaggcagaagaccatatacataataaataaataaataaaatcttaaaaacaaacaaacacaaacaaacaaacaaaaaacccaaatccatcaatccaggacaggatatatctgggcttacatgagtactcaattcccaccacatctactccctgccatgacaacaccaccaaagtagaatattatttttttccctaacagctagaccccagcaggtgatcggcaatgggaccagacaggatggaagataccacaaccaaagcaggaccattccacactgggaaaagaccctcggcagcagcatctgtgtcctcagagaccagaccaccatctgggtctcctagaatgtggaggtacctgtcaggcatgcctattaacaaggagaaaaagaaagtcccatccatggcataccttagagtagacagaaggggagaaaggtgtttggtgtgtggatctaaggtgaaggtgtctatgtcaaacccggctagtcctgagtacaacgaagggaggcatgcttagggagatgagctgggagggagacagcccatgaaggtgctgcctgcctctgtgcagacttgaccacggcattaagagcagacaggcataactaagggattgtcttctttatcatataggtgtctaggaacagtgaaccatgctgttgactctctgctgtccatcaccctgaggctgggaataaaggatgctagggaactaagaaataaaacataaaagagcaattaaagacaaaaacagatgaaggagaagctggaaagtaaagatgttgagaaatctggtatctactcagaatctaagaaatgtaaaggaccatgggtgggtgagggcatggtggggcaggcctgagatgctagccttcagaaggctgaggtagaaagatggggaggtctggggaagagggagggatgggagggaaacaggcagggagggagagagggagggagggagggaagacacagacagagaaagacagaaagggatgatatcaggcaattctctaccctaatttactctatactgtataaagatttgtgtgtgtgtgtgtgtgtgtgtgtgtgtgtgtgtgtgtgtgtgtccatccatccgtctgtctgtgcataagtgagacaaggcagtgtcagatcccttggagctgaagttagaggcagctgtgagcacctccatgtgggtgctggaactgaactttcatcatctccaagaagagcaagcatttaaccatggagtcatcttcccagccccccatattgtataacacagtgcttattcaggctgcgtcatgtccctggagatgagattttggaagacacatctggctccatgtttaatgcaaatgcaggtaaattgtgtaccttggtggacacatgaacagttccatctgtctggcaccgtccacaaggcccagactagcagaattactctcaaaagtaaacaggaaaaaaaaataatgctctccacatttatccaggaaaactgggattgtatcaggaaacccagactcaagagtgaggaaggcatacaacatcctcacctggatgaccactcgtgtgccaacaggcagagaatcttgacttcctgaagttccggctcagctggttgatgaggttctgttgaactgtagtccattcatctgtctgcctgttcatctgtctggacctgtggcccatccattcatctgacccagcactgtctccccagtcccacatctcacttcttcagctcaactctgactgagtggcctgactacagcaacagcatctgcaggcaggcagtctctagcagctcctcgccctcacactctttctgcaatatactctaacacagtggttctcaaccttctaatgcctcgacctttaacacagttcctcatgttgtatcgggcctccaactataaaattatttttgctgttaggtcataattgtaatgttgctactattatgaattataaatatgtgatatgtaggatatcatatatatgtgattaccgtgaaaggatcacccaatcacaaggaggttgagacccataggctgagaaccacttctccacttaatcattttaatccccccccctttttttttttttctttttgaagacagggtttttctaagtagccttccttggctggctgtcctggaactcactctgtagaccaggctggcctcaaactcacaaagattcacctgcctctgcctcccaagtgctggaattaaaggcgtgtgccaccaacgcccagcatcattttagcctttttaaaaaagagatttatttttattttatgcatatgaaagtatgtatgtatgtatgtattgtaccatgtgcttgcattgtccatggcagaagagggtattgatccactgaaactggagttacaaaaggatgttgagtcactatgcatgctgggattcaaacccagttctctgagttacattaagccagtactcttaacccctgacatctctccagccattggtcagaagaggcttgaagcttctttctgttcattttattctacacctctgtctacactggtggaggcagcttcagtaagcaaacacagcaaggcagtaccttagacaaaacactaatttgaagagtggttcttttttctttaagtgaccttgagtctggggattttccaaacatcccctcgcacaaaaaagaacgtagaaaagtaaaactttcaacaatgggcaactatcagaagacccagcccacaagtttccagtagattcaaaggaaaggcagaaaaacaaaagcacagagccccaggtcggttcaggcccacacgggtttctgggaaaccaggaaacaaggtttgcttcaccccaaaaaggctgacagccaattttcgttggacttgagttcttaaagatgtaaatgtttcctattcccagattttggctcgcagctcaagtagcactctttaacagggaccagcttgataagaacttaggaaatgcatagacaattacgtttcaacaaaccctcccagcagtcttctcctccctccaagcacaagtgtggagggctggaggggtgggggatggagtgggggtatgatttgcagattcctctgagagaatttgtctttctgagtctggcttgtgtcactacagcaacctccaggttcatattgttccaaatggcacaattttcttcatctttatggctgaataatattcctccctcctccctctcccccctccctctccctctctctctctctctgtgtgtgtgtgtgtgtgtgtgtgcgcgcgcgcgcgcgcgcgtgcgcgcgtgcgcacacacgtgcgtgcatgcccaagtgttatttgatggataccttagctgatcctatatcttagctatttctgaatacttaaccattaatattgttcacagggatacaaatatgtgttcagtcttcagataaacaggtaaaaggagaactgctgcatcctatggtggttctaaatttgaggggagcgttcatactgtaaccatagtaacaacattaactttcataactcctaacagtatgcaatagttttattttttccaaatcttcactaacacctttttttcccccaaatcttcactaaaaccttttatttatttattttttttttagtcatcagaatgagtgaaatttttaaggtggttttgatttgcatttcccagaagccaatgttgttgatcatattttcacatacctgtcactctctgtcctctgtactgtcccctagaaaataccttctctctaagatgcatgtctttcatccatttacatggggcaggataggtgtactggattggtgttcatgtcaatttgatacaagctaaagtcatctgagaggagggaacctcaattaagaaaatgcctctataagatcaggctgtaggcaagcctgttgggcattttcttaatgattgatgggggagggcccagcccattgagggtggtgctgtccctgggctggtggtcctaggttctgtaagaaagcaagcagtctggctgagaagcagtagtgcacacctttaatccctgcacttgggaagcagaggcaggcagatcttggtgagtttgaggccagtctggtctatagagtgagttccaggacagccaaagctgttacacagagaaaccttgtcttgagagaagaaaagaaaacaggctgagcaagtcatgaggtcatgaggaacaaggcagtaagcaccattcccacatggcctccaggttcctgacctgtttgagttcctgtcctgactttcatcaatgatggactacaatgtggaagtgtaaggcaaataaacacttttctccccagcttgcattttcgtcatagtgtttctgtcacccacacccagaacagaacccataacagagtctgaggagaacaggaaccatgaaacacatgccactggcttcttagtactccaaggggagttgttttgagacaaaactattatagtcattggttctagatacatttaatgaggattcgtgtatttcttggctggcccaaatggttctattccttatctcctctccatcacttattaattccatgccagatgagaatgaggatgagctggctcctggctggtgggaaaggctttttcttcactgattctgagaatctttgtccttgaggattcgagaacagtcaaatgaccagcccccacctggctgtcggacgtggactcacttgtagcaatgacgacttgagaatttctatacttagcctgtccatgtgacagggaatttgactgtgactcaagggcacccaaggcttccttcacacttaacttcactatatagtcagcgatgcttcataaagcccacgttcattgacagacttctgacagagctatgacaagcaactcggagcattactctccctttgactagtcaacaaccactaagatgtaccttatagctgtgagatgttctgttacctgaataagatgaggccccaaagtgaaagttttcactaaataggacaggatcccccaacaggcaggtgggtttgaggcaaggaacctgaaaacagaaagtgagtccttttcattcctgaagcacgttgggtaggttgagccttaactgcagcatttcggatgagagacgatgagctgggaaacttgactcaaatgctacactctatatgatcaaatgttgactaacttccaggcaaacagggtactcttgtgacagtaaagtgttggctaggcccatacctgtgtgcacatgcctgtaatgacagcactttggaggctgaggcaggagcctcatgagatttgaaacttggctggcttacacagcaaaatcttgcccaccctgttcctgaaaaggtattatttcttatttcattatattgtttcttatacttttgaattctcttctacccagtgtttaacttcaaaaggttattaccaatggcctggaaaccagctcagtagccaggctcataattacatagcaggtacacggctctgggttcaattcactatgcacacacacaaaagtttactactgtttggcttttcttccaaagactcacttgctgaacacatcggcccacaaaattcaggttctgatggagagagagtttaagaggtaatgtccatttctaagacatggtaggaattcaactggtattgttagtgggtgaccctgggtaatagaaaggaagaccatcttagaaaccagtgtgtctgaaagttgtctggctggccagacctggtaggacctaagccagagaattgtaactgaggttgaacaatcaccaccaccacagtccccccccccatccttccatccatccatccatccatacacacacacacacacacacacacacacacacacacacacactgagtaagacacaacctccttagtatcagtcatttaaaacatagtgttcctcactcctccagttggtggcgctgttctagggaggtttaggaggaaatatatcactgggagcaaaattagagattaaaagcttcctgccatttctagtttgatttctctgcttgtggttcaagattatgagctctcagcttcaaaattccactgccatgcctgcctcttgctccctgccataatgaacccttctctcaggaaccataaacccaaataaaccctgtcttctgttttgttttgagacagagtttctctgtgtagacttggctgttttggaacttgctctgtagaccaggctggcctcgaacttacagagatccatcctgagtgttaggattaaaggcatacaactaccagccctggcttaaactctgtcttctgtttattgcttgcttttgttttgtttttatcacagcaatagactaatacatcacccaaggaaaagtctgccttctatatcttaaaattatataaaattctcaagattgttatgtttctagattttaatacaggaataaatttttatgtgaagcccttaaaaatgatagcgaggctgacaggagaaatctgcccatgcatccacatgttgaaggtaaaattacttacagatcatcatggcttttatcccttgctgaatgctggaaagccaccaggattatctatctggtggctcatttcattctaaaagaatgaaagattctagactgatgtcagctctttgtgtaaacatttaaacagtctcaagatgtaaagcaatctttacttaaaaaataacttcttccggataaatattttgactgggaagtaacagatctggaatggagaacacagttcattttttctcaatgaatgtagctttacactgaatggcatctaaaccgtgtactctattcttggggattcagttgtttggccaacagaggtggaaatctgagggcagggtcggaagtgatcttcaggaaggtacctctctgtacagggtgggttgtatcaggagtgggtgggctacagcttacttctctgacaactgcctataatcagcttggcatccaaggcagtcctctaaatatgatgactgacacagtaaccagaattcacttcatcctccaccctacccacaccctcctcctgtaagaggttcctctctataaacatgtgttttcatctttatgaaagcagctagtctaagtggagcctgcttctgtgagaaacatgaacaggggagacgacaacacaagaatgtttccaaataagactggggacttgccaggacccagcctgctgatctgagtatgtgccaaggctgataggcacaggtggctgcttcttggccttaacttacagtgggagaaacaagcttcatgagtagtttttcccatcagcccatttttttgcatgtaccctctccctatagctagatggaaaaacagtgcctggctccttatctccagcgagtagctttaagggtggtgctggctctgcttaacaggctggcttccaggataacagagctcagctccagggtcccccacttctttggacagagataaaagataattatttctcagacagagcagatatacccacatgaataagagctgacatttttgagaaaatgaaggaaatgaaagccaggacactagatgctggccatgccttgttctttcccctctagcctctgggctccattcatctttaggagacaaaagaaatgtctggattggaacactaaaagctgtagcatatgaacttggtaagagaatggagacagttcttaaagatggcttaaataggtcatgaattatttgttaagaagtgttataaatgccatgtgccaatccaagaggaaagcttaagggcaagcatggagcccaccttgctcttttatcccttgtcaggactagaggcaaatggatgtaaagcaaagatgccctgtaacagactgaggcctttggggagcggtaggctgtagactcagcagggatgaggcatgtcctgctgcttcttactcaaaggtactgaatttgtggtttgttcaatataattactaccacagttgctattacatgcctctacacaaggaacttaataaactgggatggatggatggatagatgggtggatggatacatgggtgggtgggtggatggatacatgagtgggtgggtgaatgaatggatagatggatggagggatagatgggtgggtgggtgggtagatggatggagggatagattgatgaatgggtgggtgggtggatgaatacatgggtggatggatggatgaatacatgggtgggtggatggatggatacatgggtgggtggatgaatggatacatggatggatggatggatggatggatggatggatggatatgggtgggtgggtagacagatggatacatgggtagatggatggatacatgggtggatggatggatggatacatgggtgggtgggtggatggatacatgggtagatggatatatgagtggatggatggatatgggggtggatgaatggatggatacatgggtggatggatacatgagtagatggctatatgggtggatggaggatccatgggtgggtgggtgagtggatggttggatagttaagtaaacaagtgggtaggctttcaaaaattcccatagtgaaatttggtatcaagtcaatataaatattatattcctttacagaccatggagctaagttatatttggattaaacgtcaggtttgagaagcaatgaaagttttgtaaattaaaataaagatctgagatacacagcctgatagtaacttgcatttaaatattttctttaacaatctacacacaatccaccatggttaattcaagttgctccagacatgagttaacaccaactacatccaaagaatcactaacttattgccaaaggtagttttacctgagtcctctcagattttccttaaaatgagggtattctagggattggataaaaattaaaagtctagtaaccatagctgggcatgttggctcctgcctgtaacactcaggaggtggaggcaagaggcttagaggttcaagtccagctttggctacacagtaagactgagccaatatgaactgcatgagagcctggctcaaagggggaaatgttactaacctaaacaatttctactttcacctaaacctgaaaagtccaccttattgcctgatacatgctagcattaaacaacattctttgagtgtcaatcagggtgtggtgccgcactgttgctaggtggggaggtaactctggaatcaggcctacaaaggagttcctgctggtcttcaacatgagcttctctttgggctgttctgcctgaccaggcttgtctaaggcaaccaatggcatctactcaggtagggaacatgcatgttagttggtctcccctttggatcttggcataccaaggaatagcagtaagccaacatttcctggaaccagagttccctatttctcttcccttccacgtatgtttagtcagtcaggtgccaggtgctatgtcctctgccactattttctatctttagatatcaaaggaaaaaggtaaaatctgttcccagttatgctgacctaacctgtatccagaagctgatgttaaaagttcaccaaagcaaaaaccaggcacaaaagtgactagcaactaaattagtcaactgtttccctagagcagggcttctcaaaacttcttccactagcaacaacttttgcctgagaaataattatacaactccaagtatatatttataaaaaaataccaaatagcatatcattactgataataaatcagaaaatgtatttttaaaacaaccctttgatggataggtactacttttatttattaaaaaggcaaatttgtatgttaataaggtagattatttatttgtggttacataaacaattagaccatggctgagaatatttgatactgtggaatacagagcatctaacagttttcagagtttactgatattttgattttatggttgtcaatggtgagaagtgtgctcagcaaaaatacagaacaaaatggcagaagttgcttacaacaacttcagaagttgctggtgactctgttcaaatagcaagccaaaatcacatgatgattttgggggacaatcctgtaagttgttaaacacaagcctttgaaggcaacaggcaggcaggctaaggaacgctgaggaacaatggtgagacagtattaaatctttgttttccgcagtacgtgtttctataagagcagaaaattctgtacggatagcaaaaacatcgcaatacatactatacaagcctcttgattctaagccaaggtgttcaggcatcgttctcaggcactgcatggcaggatggcatgtatggtatgatgcgtgttcggaacaaagattgtagggaagccatatgatacaaggggaagcacagtcagcaacactctaggtccgtcgacatttgattttgaattaattcttgattggagcatgctcagaaatctcttcttgttgtcaaatattccatgacccctgcactcagttatgcgacctcatatgtagttacagcccacattttaaaaactgtgtcccccagaaggtgtgctatggggccagccctatgttgagtactgtgagagcaaacaggaatcctaagttcaagtccttgagctaaggagcctcttaagactattggggctggagagatggctcagaggttaagggcatttgctggtctttcagaggtcctgagttcaattctcagtaaccacgaggtaactcacaaccatctgtaatgagatctgatggcctcttctggcctgcaggcatacatgcagacagaacactgcatactcaatggatggatggatggatggatggatggatggatggatggatactgtgaaacaggagtgagtgttacagctgaagtctaaaatgacaccacaggcccctgatttgaatgctggctcctcagcttgaggctatagaaggctgtggaacctgtacaagacagggcttggctggaggaaacaggtcaccaagagtgacatttgacagctataatccagccccagcattagcctggtctctcttcctgctttgctacctcacactctcacttcctcacactcgtgaaaaagccacctcagactcttatgaccatggatggagctactgtcactgccatgcctcccgtaacatgatgggtcaaaaactctcagaagccatgaggaaaacaaacctttccccttacgaaaagaaataagatatcattctcctcttcaataacacaaagaaaggagtaggaaccaggaatgatggtgaaagcctatcatctcagcactggggaagctaaggcagcgggactactaggtcataagttcaaggccaacctggactacataataagactctgtttcaaaaacaacaacaacaacaacaaaatgacatttggaccaccacagggaaggtgtttcccaccagatgaggagaggggctcctaaaaaagggagcctatgacgccaggtagactgatggcaaagcctgctattcttccccagtgtgtctgaaacaatctcaacaaaaaacgactccttattgatcttagtaagatgatgctaaaattcacagaatgaaaactaaacagtctccacttgcaaaaggcattatttatctaacacaatgaggtggtggtagggtgaagagtttgtcaacccaacagatggcagtagagcaagagaaaggcattgtgaggataaatgaatcacaccatgaagtcaggtacaagtttataccaaggaaaatctatttacattgaactaaccagagtcagagcataaaataagtgctgataagaagagggggtgagagctgggcagtggtggtgcacgcctttaatcccagcactcgggaggcagaggcaggtgtatctctgtgagttcgagaccagcttggtctacaagagctagttccaggacagccttccaaaaaaaaaaaaaaaaaaaaaagaagaggaggtgaggggccatggtagggatttttaaaatatacaaagcagattatatgtttcttttttaaaaagatagttctattgtatctctctcagtatgtgtacgtacagtctctctctagcagagctcagaggaaaactttgcagccagttgtctttctctattaataccaaataggttctagggcttgaactcaaaccatcaggcttggcagcaagtgccttcactactgagtcatctttaccagccccaaatacacatttctttagaagactatgctcacagacacacacatgatattactgagtcatgtctgaggacacttcaggtgtttagtggacaggggccagggaacagaataacctgcaaacccacaggacagccccatgcagcaaggagctgccccatgcaaatgcccgcagcaaactgccactagggataagacaatgaagggcaggtcttctaggactttctaagtactaactgagacacagtaaaaattgtaaagttgaaccactgttagtttgataccattttaatttgaaaatgatctaagttttcattaaaactagataggtatataatctctcctcaaaggcagaagtggggaatcaaccttacataaatagagaaaatcacctcatttcctgagatgtctaaaataggtctccactcgtgaaatacattttcacattttattgatacaccattaattataataatattagtattattccaaatgactgtcaatcactcctccctgacctgaaaaagagaaagcagcaagggacatgcctgggaaccccacagccttagcccagagggagtagagcccactgcaaacagttgctcctagtgaaaatatctctactcccagtgccatcctgagctgcccacagctgcctccagcagtagctcactgcccccccccccaccccgcacactcctcccaggcttctgtaaaaggagagaacaaaattgttaatcgaccttcctgcctttttttttttttaaaaaaaaaaagtatttcagagtcataatgcaattgaactgcccaaaagtctgctaatactgccatctagtgaatagtgcctgatgcatagagcatctctaaagcaactccagaagctaagtcccctcttcttaacgtccttgatgccttgtatgcagaacattggagagagtgaatagaaagctgtcagaatgtggaccgttacatgtaagcatcagttaatctcagaaatgagcatagtggggtgcacaaacaaattctagtttcccatcatgcacgggagctctgtccatctccagcagtgacggctgcacagctgtcttcactgaacatgtggctggtggccaggcacatggctccccatgtggtgacccccctgtgatttttcctgagttagtgccaatttaacctctccaccacccacagatgaacagagtaactggccccagttccttgtttcccttggctgcaaccaaggggacctgcaaccagaacagtggctattccaccatgtccccaagccttacatgctgttattgttcctttactcacttcctctttctgctgcgtatcctcatcttctgatttctgtgcttcatcttatatgctctgttaagccaacataaagttttctcaagccaagattggtacgtataaatgaacgtcatcgggattgcttgtcgtatgcctggtattctcactggcaccctgaccgtgcaactacaggctcatccagacaaacatcggacaatagagattcctgaccttcagggtctcctccaactcgtacattctccatgaggaaaggtgctagtatacaaactggaccttggactagtgtcctcaccaaaaagatgacccaccttctactcattccagaatggcttcctggcatgtccacctttaattcaagaagcttggtcgcctgacaggagtctttactcatcaccccacagtattaactggttcagcactgtgtcccattccttgacaggtacccatatactcccaagtatcatgcagtggtaggaaaccctttcaattttactctatcagttttcctaaaggcagagcagaaactatttaagtagcagacatgaagatgactacattgaaaaccccaggatacaccttcacaaacacccaggctggcttatcacctctctgtgcacacacctactgagctacctacaacctgtgcttaatgaccgacacccagggggagttcataatctcagccttgggctgcaagtccttagcactagtaatgagatattaaaaactatatgggtcacagaaataaccttcttgatcctacacccaggagccccaacagttggctccatgtgttttaagaactgtgcaaagcacaaaacagctgaaggattttatcagcaaagggtggtataggaggtgtgggtgggccgagaaaggaagcacttggaatagcaggtgtgttccttatgcaagtggaagctgtttttatttcagaagattgtattttataggcttaggcatgcacacacaaaagagtcacatcatccaggtgctgtagagaactgaaacattactcagaagataaactatcaaaaaggcctcggaaagtgagaacagtatcatcaggaggccagggagtcggcctccaagctcctgacgtactcctatacaagataggctgtggtatccacaacggatgtgaaatctagcttgtctggaatttgcctctatgcagggaacacaaactagatacccagcccacaccagcccacaccagcccacaccagcccacaccagcccacaccagcccacaccagcccacaccagcccacaccagcccacaccagcccacaccagcccaggtgtttgatatggacacatcagagagcatgacagacggtttcatggtttttattccaagcttaactaaccatcagttgagatatctacttcttcctacctatgttctagatggaatctcagaaacaaagtctagtcatgcaactttagaaattagaaactatggcccagaatgagtgaagtttggcccagacaactggacttggttcagtgacaatgtcaatgacttagtaaaggattccttagcctgatgtttttagtagaaagttgtggtctaggcctatgctagcaatagcatgacatctttaaaggtcaaaaacccagtattcatgtcagggtaccttctctgggaacacagggacaaatagagacaggctggcactcaaagtgacatgcgcctatcatgtgacaatcaggtcagagtaacagaggaagtgagcacgggacacagactttgaaacactccaataagacaaccaaatgggagaacaccattgctgccttcttcgggctcctaaaagacattaactgtgtcaagagcagtactacatactgatctctttgctcactgcaattcgcagagaaacagtaaaaccacaaacttaacgtctacctgtggatctagaccatgagacaaatctcaaagatagccagttcacagacacaaagacagaaaagccatctcaacctactctccctgctttgcagtgtgaacatccctctagggccccagtcagatcacccttcacatttacctgcaaggagtggtcagtgacctatggcccaggaaagctggggctgctgattccagccatagctcaaggggcaaggataccacataggagcctgcccttcgccacccagatactacactatgccaacactgatcactgcaacagcgtgttgggagacggtattaaagaaactatcacacagctaacccctgtgcttagctttactttttaaccacatagttcatcatcctcccttctatcagacccccttccatcagaactatctttctcattctgtccttcattcgttgacttaagggtacatcatggttcattttgctgagtggagctaaggtcacgcgaacaattgttttttaacctcatacctaagttgttccaccttgtaaagataattgggtttacttttatagttttaagaattttgataaatagaaagtgttcaagaatattaaaatatacttatctccaagatctagttatgctcatgaatttatcccagggaaataaatgattacggcatgaagacctctttccataatatctaaggtggcaaaggattaggcatagtctacacttttagcattaatagcattaaaacagtctgtatattatggtatgtgaatgcaactgaatgctatttatcataattgcaaagacctcataaataagcagaaaaccccaatacctcaagaaaatgtggtgtcctctccccacaaaaattaaagcacatcaaaatgcatactaactatacaaacaaaaacatttgttatatgagaatggtaaaagttattggtcttttgaaaacattttgttttctttaacaaataaacataaactgctggctagccagtggtctgtggaaaattaattttgctgcagttccaaactaagctattgatcagactctacgagaatttacaggcttaagttataatgaaaagtccactaaaggaaatgagagcggttccatggattaaaaggcaaaatgtatgcaagtagatcaatgaatgccggatatatttacaatggttctgtggtgcctgccaatcacagttaaagaatccccaaagaacacacaaacaaatccatttaaattagaagcaataagcttacagatgctttctcaattaaaatgctgtagtgccatcataaccctgatgtcgagactacaggcttaataacaaggtaaaccttactagatgaaagaaactgactgattctctctctctctctctctctctctctctctctctctctctctctttctctctctctccctccctccctttccatccccctcctccgtctctctctcaagggtcaggagtcaagttttcctccctttggttctcataacataaagattttcaatgttcttccaagagatccagtcccaacggacagccaggcgagagagtaggaggccaacagtgacctgagcgccgacaagaggcgtgagtacatgcctatgtgttatttcccatgcttccatccaagaacaggctgtacggaggcaatgtgtatgaatgcatccattatgcatcttgcccttgccttatcccactcaaggtctagcattggcttaggtcacctcccttggatacaatctgtaccatcaactggggtggaggctatgaagaaactatgagttggcttcatctagatagcttctcaggtgtggttcaccaggcacaccctaatagctgacactctttaagaacaagttttggattctgtctactccgttggcttgatgaaagcctgagtgaccacatctccctgagtgatgactgtgcccctccctcaggaggagttgttcgtcactgtagatccagtccaacccagtaaacatcaaccatctccatcaaaatgctttccagtgccctcttcctcttacatgatctgaaacaactgcattgccccacagataacattggccagtagaaataaaaggggtttttgttgttgctcttgttgagtcatttattagtactttgtatcccagactggtcttggactcactgggggagtgtaggctggcctctaattcaaagttcttctggctcttctttctcaagtgctaggataacagctgtgaggcaccatacccgactccaatagaagcttttccaaaatctttttaggtctttaagggtatatacaagtgctgatttaaataaaaaagttggtctatcatcaaaaacataacataaagtttctatgtgtgtatttatctttgcgtgcgtgcgtgcgtgcgtgcgtgcgtgcgtgtgtgtgtgtgtgtgtgtgtgtgtgtgtgtgtgtgtgtgtgtgtaagccagaggtaaatgtttggtgtctttcattactgctgttcaccttatctttttcagacagtctctctctctctctctctctctctctctctctctctctctctctctctctctctctctctctctctctctctcgtttatggattggctggactagctggccagtgagctccagagatttgattatctccaacactaccctgcccaaacatgtgcaaacatgcctggcttttttttttttaaaaaaacatgagctatggattggaattcaggtcttcatgcttgcactgtgggcattttaccaactaagccatcccccaggtccacataaagtcacacttgttataattttggaagttttacatccttctaacatttcacagtattagataatcacacagagaaatttccacatgacaacctccaggactatgcttcagacagccagggcagtaggcatgggaggaaggggatgtttttaggatgcttctagatcaacctaacttcacacatccattttgctcccttttctttgccattgcaccataacctctcctccatcacagcgacctgggataataagaaaagtcacaatctcacagatcttcgagaaaatgtttctagaactccacctctgggctgggtgagctgacaatctggctctcctagtctggggcaaagcataggtcttcaggcacatgcagccaatgctgggtcagtgtgaaatgcaagactctgcacatgagccaacaagcccacggcaggggagtaccagctgagccttcgatgtccaggcacatcgcgcacaaggagcttaggacaaagttaatctcaatgccactctaaagacccagtagcatgcaaataaatggtggtggtggggtatgatggatgaatgaatgaaagggcgtgccactcaactgatcattattctgagactgtattctaaaggatggtccacaaaaactcatagaattagaagtcaagtgcctgtcaaagtttcccctgagcatacacttacagactgagacaagcaacttcaagtctcttcctggattttacaccaactctgcagccaaaccttagagaacacaatctcccctccccctttctcttactttcttcctccctccccacctctgccttctatctgctatctccacagaagaacagcatcaggcacatagtagggccttaataaagatctgaggagatgacgaacaagcgttaagagcttgctaattctggatctcattaactgcagttgttttattaggacattggcttatacctttaaaaattatgcctttaaaattcttttttttttttcttcctgagacagggtttctctgtgtagcgctggctgtcctggaacccattctgtagaccaggctagcctctcaaactcagagacccacctgcctctgcctccctcccaagttctgggattaaagacgtgtgctaccatggcatagctaaaattcttatatattgtatacttaaaatcaaatatcctaatgttaattctatatagttagctaaaaggaaaaatgagaacccagagtctaactgctctattcaaaagactcagaacacagggccatccatcaacatgagcccagcgttcctctccaccttggtagtgcagaccagccagctcccccaccaagaccaagtcactctccctccaatgcttctcactacccatcccaaagagaacaattctcaccagacagctgccccttacaaaagcacattttcatgccactcagacacagtagctttctggactaagctgtgtggtttcctatattcctgagtatttagggccagccaccactgaggagggggaggggtccttccctacctcttctttctcctgatcctcccctccagcaccaccagcatgtactgtattttttttttcttgtttggttggaacctccagttggctcctgcatggtctgagaagtcccccccccaaaccctgacctctcagagaatctccaataaagaaaatacaccagaaagcccagttctgcattctgggtggctgtggcagctcttccctttaagtttttttggtttgtttgtttagttggtttttgtttgttttttgaaagtggggtttctctctgattatctttttcaacaattatgtgtctagtctacatgtgggtttgtacatgagtgtagtatccgcagaggccacaagagggcacctatctccctggaactggagttaaaggcacttgatatcacaagtgctggggacccagctctcatccttcagaagatggggtttctttttattatttatttttattttatgtgtactggtgttttgcctacatgcatgcttatgtgagggtgtcatacaccctggaactggagtcatggacagttgtgagcgccatatgggtgctgggacttgaactgaggtcttctggaagaacagccagtgctctcaaccactgagctatctcttcaacccagaagaggtgctctcaacagctaagccatctccccaggtctaatgttactgcttttaaacccacaatttcaccatggtatgcactgtgtgggtctcatcagccgagggctgagaagaatttgtgggctcggcaggcacatctaatgtcctcatccgtcactcggaatttcattaagcatccctcatagaactggtctacagaatcagtgtcaggggcaaatcaagtgctcagcaagtaagagaagcctctagacaaacacttcgtttttttaaaaaaagatttattgactttcagtttatgtgtttgaatgttttgcctgcatgtgtatgttcctggtatccaaggaggccagaggagggtgctggagcccttggagctggaattatagacagctgtgagccaccatgtgtgctgggaacctctaaagagctgcaagtgtcttaagcactgagccatcgctccaaattctaaattctgactaattataaattagtctaaatttataaatataaaaataaagcatttttattatacacgtgtagcacacatgctcctcagaacatacgacgctcatttacatagatcagggtatttcttgacaaaatctgcgttacacactttagcacctggactttttattctccagtgccctgggatcgcttactgcactgtgtggagttcagttctccccatttgccctccttccagctacctgtcctttatgatcagaacaatgctactgtccccaaagccttccttgacagaggtgttcttacttctcccatcacctgcatcatttcttctttgggtcacccccctcagcacatacatggctcatatatggcaggtgctcgaaaacccacataggaaaaatgtttctttctaccagccgcttagtagctgtgatggggataacctcgaaacagatcaaggatccaccagcatggagtctagcgcaccagtgcaatggaaccttacgttcctaatgaatggcctctttcagaagcacttcaaacaaaacatggctgtcttgaaaacacatggtgggtggtagtgacgctcgcctttaatcccagcacccaggaggcagaggcaggcggatctctgtgagttcgaggccagactggtctacagagcgaattccagcacagccaaggctgttacacagaggaactgtttggggaggggcagggtagaactgaatacatacaggcagtatgaagaatggactcagctggttttggtttgattttgttttgttaaatgtcaggatgcacatttacaccccaactttatataaacttgacattaatcagcacgaaccattttgagctaacattcatagcatcacacagcatacatctgaaagtctcctgcatttactagagtcagagtcattccactccctcagagactgccatggacattctgacggtcaccccacttgctttaacaccgcttgtatcttcagacccatcccagttctcaaaaaacagagaagcttcgcccactattccacccctatctgaaaccagaaacaagctacatcagtgctgcgccccaagcttcccagggtttgggtcaagcgattcagtgagtaggactcttaggccaaatcataagacagcaaataaactaacatggaaggatgagaaaggtaaggggtgctggaggagaatgactcctcccattttttcattgctatcagttatctggggtctcctcagggcagctcctgtggtcagaaaaaaaaaaaaaaaaaggcagaatccactctccttccatcttcctgcattcctcattataccagggtcactaaacaaatgggttctaaagcaagaaatttcttttggtctttggcttttcaagacagggttgtcctggagcatactctgtagaccaggctggccttgaactcagagatccacctgcctcagtctcaggtgtgttgggataaagccatgcaccaccaaggaactccttatgaccaaagaaattctaccaaggcactgaaccacagtgaggcagtccccagtgtgttctacctatactaaccacccacaagcttgagtggcactgattcatttacagccaaactttccttcctagttcatttcttactcactttttggatgccggttaagagggcaagtgttctcaaaatcaccagaacaaaacaaaacaaaacaaaaaacccacaaaacaacaaaaccaaaaaaacaaactaacaaaacacccagcaggactaaccacttctgttttagtaaaactggccatttcttgttttgtttgtttatccaacaacaggaaatttctaggataagtaagttgtaggcggtcaatgtaaaggtgggaagctccatttcccacctcagaggtgcacgcagcaaacacaaatgacttggcatttagttttaagtgttcagcttcatttcttaaaaaacaaaaaaggatttatttgggtctggagagatggagttctcagacaccctgaactctgccaattggtttttttttttttttttaatagagtatgttttcgtctgtgtatgtatgcgtttctatatacatgtgtatgcatgtgcccatagaggccagaagtgggaactgaatcctttggtagaaaatacatacatttatgggccaccagctgtggatgctgggacccaaacttcggtcctctgatagggcactaagtgctctgagacatctctctagccctcctgcctcctattctaaacatgattagtgagagtgcttgggttcctctgcgagagtagtacatactctgagccatttctccagcacttaaaaatttaggcaaaccacgaggagagcagccacagtactcttcttccttgcttctttctcttcggggacactgtacaaaagcatcttcctgggaaggcttaagacccaaggctcacacacatcacagtgatgctcctgaagggaaagcatggtctggtttcctttcagttagcatctgtagtgatggacagctgtgactgtcaacttgacataacctaagaagagggtctcaaaggaaggatcgtctacaatggctcagcctgtgggcctgtctgtgggagactgtcttaatggtgtgggaaaacccagcccaatgtgggcagcgccattccctaggaaggaagtcctaaaccatgcaagagtggaggatagaactgagcacaataagtattcatgcattcgtctctctctgcctttgactatgggtgcaatgtgactagctattagaagttgccgccttgacttcctcataatgatgtaaccttgaattgtacaatgaaataaaccccattcgccctgtttctttctctttttttcatcgtatttcatcacaggaacagaaatgaatttaggagaacactggataaacccaagtctttaacttcagagcaaacaagcaaattcccaacctaagaagatgggtactcccagaatctgccaacaaagaacagacctgttggcataaaatccaaagctatttaagaggtactgccagaaatgggtggagggacagtgaaggtatgttgagagtggggtgtgtgaagggcgaggaagagaagtgcctagaaacagggatgtgctacagcggctccctcgcttaacaatattaagttgaaacacaaggcatgcaaaccacagtgtttacatagctcagctccatgcctgctgttctctacatcactgcgtgtgttgccacactgtaggggactacaaagactcagatacacgtctctcctttcatctcagacacttaatcatcagtaggatgatcctgggtaatgatgggaggcatctaggaccagaagggagcaagtactttatttttaaagggggtggggctcttacagcccatcaaagtgcagcacccagtacagtgaagtagtattcagtcttaaaaaactcgaggacgcttcgctaataagtaaagtaagcatgcatacacataaataaaaataaaataaagcaaacaattctgttgggtgtagtggtgacagatacctgcaatcattgtacttgggaggtagaggcaggaggattgggagttcaaagtcatcctcagctaaatgataagtctggggccagcctgagctacatgaagccctgtctggagaaaagagaggagggaaagagagggagaaagacagaagagaagtcagttttttttttaataggaataaaattcttttaaaaggtaatggaattgaaacagatctgtgaattacagaccatgtaaaattgtggctataagttaagtaagacctaacaataaatgggaataggcctgaattcccagtgcttgagaggctcaggcagggggattgcaagttcaaggctagcctgggttaagactgctgtctcagtagaagaaaatgaaaaaagatacggtaaatactcatgtaatcagtatctgaaacgggttagcatccagaatatgcaaggaatcccacaactcaacaatcaaaggacaaatgatctaactataaaaacaggcaaggacttgaatatacacccctccaaagaaaatacacaaatggccaataagcacatggaaaaaaatcatgcgtaccatgggttgtgtagaactacatctcagtgagccactattgatagtccctaaggtagttaagatggttttaaagaataatgagctggaaggatgtgaggaaacgggaaaccccttctatgatagtgagaatgaagcagtttagctgatatggaaaacattgtgttagtttctcaaaacaattcaatagaattcctataggacacagcacactccaagatacacaacccacagatgtcagaaacagtgatgcaagcacttaaaccctgagtggtaacagtctaacagaaagggtccaaaagattaatagagagacatatatgcataaaggtatacacatatgatggatgcataccacgacacggctgcactctgaaaacacaccaactgaaagaagtagtgagatgctaaagtgaagtggatgcccctctgtatgattgagaatgttttattgccattgattaacaaagaagcagctctggcctatggtagggcagaatatagagaatatagagaataggcgggaaatccatacagagagagatagagggagtaaaaaggtggagccaagggagacgcagcggccaccgaaggagtagatgccagagcattaccattaagccatggagcaggtggcaatacacagcaccagccaataagaggctgagccatcggccaaacaattataattaacgaataagcctctgagtgtttattcaagaactgttgggcaagagaggaacctctatttacacaaaagatcgcactagagtataatagtatttgagcgaagtgttcagaattagtgagttcatagagccgagtcagattaatggccgggtatgctgggtgtgtggagaatagcaaggctgcctctgcacccggagcattcttttgtgatgataaaaagctttcaagacagagagggaagtgacacataaatgaatttttgttccatggaaattttatcttattaaaagtaaagtttgagaaatagcacaaaggtaagaatacatccttggtgctggagaggtgctggtttttcaaaggacctgagtttggttcccagcacccatacggcagctcacaaccacctgtaactcaggcatcagggaattcaatgacctcttcatggcctctacaggcacctgcagaccacgtcagatatacagttaaataaaataaattaaatatacacaaataaaaatagatcattttacaagaagagactaggtcaccagttcttttttgacatgttagcatggaaaagctgaacagtaggacagtaggagagtggacagtgggaccagcttacatgagggcattctacatctagctgcctgccactctgggcaacaccctgaatgaagaactatggtgaggggagaggaacacactcccgatcaggagttatgcaatcctgggtcccatgcagtggggatacatgcctgggacataagtaagtttgctcagtccgggctgtgatctggctgctcttactcgtgcctatgcaaacctgactcagataaccagtgcaaccaaagcggcttcgtgtccttcttccattcagcttctaaaaagaaacagtctcctgttctctgggttgactcttcatgagcgccctctccagggcacagcaagaagggcaggagggtgctgcattttatccctgcagctcttatcttgctgattatggtaagcctcaatctcaggcctccagtctccccagaagagacacacaccagaacacttattttctgagagctcgggtactttaattcctagttaatcctttgttaacgggcaccaactattaaaacttgcccacatttctttgggtcatttcaatgtgatcattgtggggtggggggatgggggaaggggaaggaaacttcaattgggggcagattttcaaagcatctttaagttgtttctataacttagaacatagaaactttcttataactaagaaagggtgatgtgaacatccacacatctctagtctctgaattcctccggtggacacagtctgcaccaaccagaggggctcaatcaaaagggtttcaccatgtggcagaggaagagtgactggaatggaatctgaaccattcagacttttgtgttcaacttttaaaaactttgcctcattttaagtgtcattaaaaattattaatgctgatctgggcggtggtggcacacgcctttaatcccagcactcaggaggcagaggcaggtgcatctctgtgagtttgaggccagcctggtctacagagcgagtgccaggtcaggctccaaagctacagagaaacctggaaaaacaaaacaaattactaaagctgaaggttgtgaggaaaaggagacttgagaggcgtggacatttctttcatttccacactctgagtcccttgcagtttctgtggtctctgacaaccactggggtttggggggaggggaggacactgggaagaacttctttttcggtagagaacaaggtagcagttaccggccgtgatcactgtgccccttgaatctgattttctgtacctttatagtaagacaccaaggacttaggatattgcaaatcattgctttaacagatgagaaatgaactgtgaactgtgagaaatgaactcttgaattatattagctacagctgtaaatacactaacagcgtgaaaaaaaaattaccaaggctatttttaaacattttagaaactacagaaacctcacccaatattattgaatattttaggatgactaccactaaagatctaagttcaggaagtgaaaagcaaacccctgggttctgtccctcatttcatcttttcttaagatatcccatgaaatacaaacaatctcagctaattaacgctttaggacttcacagtaccctggggatcactttaatcctgagcacactgcttcacactctgaaatgaaagttccacgttagggtgcaggatttagagacttacaaagtcaaaaagaaatcataactcctgcatttttaatcattcatcctcccagccaatgatttacccagtaattcccaccagaaaaatgaagaaagttttgagggacgagttattctcaatgtaaatctcctcccaggctctgtcaatcatgttagccctttccccctagttagccttttcccacttcctgcctgaaaactacactactatttaattgcttggtgacttcccattttattaagaggcagaaaaacatagagagctaaaacatggagatgaggctacagccgtaaattgtccccttaagcaatgaaacttgcctctgcagtgtgataaggtgggcactgtggaaaacccctacaaagtgcaattctgcggaaatccacagccgccatcacttacagccagccctgcagttttcagggctgagtgctatccatcagagccaggctggtcgactgtgtgctctctagagccagtgtgaagggcacagccgggaggcaactttgtctgccacccttacccaccccaaatttatcttctgttctcatgccataagaaaacccaaagaaagggtgggatgcagcttgggctggggcatcatgcagcatatataagacatgagttccatctctcggtaccaaatggaggtgggcacaggagacttttaagaagcacggctacgaaaatttcatgacctgactgcattccacctgccatcctgtttcttagggaaatcaaactattttgccataatccaataaaaactgtagctaaatttccagccttgtgaacttttttcctattcatacactgcccaaaactccatttcttcctctgtagtgaaacagaaatcgttatcagattatgctgcatcctggaatgtggcagagcgtctggcctctgaagactgcttccagtgagtctcagaggctaagtggggtctggtgtttcaaagcctgggaaagcatcagttggtgacttctctaggatgctgccagccaagaaacaaaggcagcaagtgttattaaaaccacccattgatgtgcgcaagaaagtggggttttgatgctgttcggaaaaccatgcaagtgcatagatgagagagagagagagagagagagagagagagagagagagagagagagagagtctggtagggcacacaagaaactcagcagggttacaagagagggaagtgaaggggtaggatactcatttactttctttttaaagaatatttttagatttttattgtcatgtgtgtatgtgtgcaagcatccactcaccagagaagaggaaattcatttccctagaactagagttactgatagttgtatgagccaccatgtgggtgctgggaattgaacctgggtcctctggaggagcaataagtgttctttcttaaccaagtcaactctttgaccctctatttggtttttgtacatgctttattgagtatgtgaacatgcattacttgagccattaattttaaaagagttaaaataaggaatagcaatcaatatttttttaagctaccaagtcctaaacagtacatctaagtgaaagattgggttgggaaagggcgttagataccagaatgctgaagtctctcagttccagcgatttctaagcagacagaatttcctgaaacaagattgcctaaaattcccagcaagtttagaagcactgaatattgagccactggtaccagtccccgagccagcaccagctccttccctccttcttagaagcagggccctgagggatgaccccaggatcatctttcccggcttccctccagcacactcaccagaaatttggctctatgaacagctcctgcctttacttttcatacaggactatccactgagagaaaagcacataaaagaatcaaaattactatgagtccccaaggacttatgtttgagttggtgacttaaaagaattgtatttggctactcatttaggaggggaaagtgccctatcccaaataatagttcaagctaaagttcaactggatatatttaaaatgtcacataaagtcataaaacaacaataagaaaatgtaagtcaattcccatgaagcccagtggttgggaatattgttctggttcatgtcttctaaatacagaaagtaaagcactagacaccctgttacagacacagcccctaccccatgagagttacagggggaaaaataaatgaaagataattgcaactggtaagtactcaaagggaaaagagacaagactgccaagtaggagaattttgcagagaaagatgggcagttagacagcaggacactcgggggaagtctaaactgaagcctgcaaaaaggtgatccaggcagggcgggggaacactttagtgctaggggagatttccaagagctgtgcatgaatggtcctacttaatcctaagaactcttaggtatgcattattatgaagatgagtccaaagtcacaggccggaaagtttgtaaagtaacttaggtgagagttaatgaacaagaagccaagtgatccccaagcaccaggagattaagtcttcattctagaacttgtgtgtgtgtgtgtgtatgtgtgtatgtgtgtgtgtgtgtgtgtgtgtgtgtgtgtgtgtgtgtgtacgtactgcctctgtgagcactcgtctacaaggtgtgtgtgtgtgtgtgtgtgtgtgtgtgtgtgtgtgtgtgtgagagagagagagagagagagagagagagagagagagagcgcctgtgtgtgtgtacatgcacattcattccctgcaacgacgcgtggccaagcactggaacacagtgttcaagggtgccaagaggtggggatggagagcaggcccagccagatcatgtcccaccttgcaggccatgataaatagaatgtcaggacggctcgggcagggtgtgtccagtagggccacacctgaaagagattacaacagcgcaaagactaccacattcttgtttctaagcaaatctatgaagaaataataaaggaaaataaacacttgactatctataagatgtttacatatagtcaaaagcactaagcacgattaaaggccaaaaaaaatgactatttacttgcatagtaaaacatttagaaggaaaacattctggtaaagtagaaacaaaaatagccatttctctagagaaacagtcaaagtgcctggctggaaaaatctacaaaagaacaaatatgaatgcgtcagaaaaagttcctatgtccataaagctccacgaactttgttttgttgttgctttaatttcatgcttttcttaagagggcaacctgtaggcgatgggttttccttccacatgtgggtgctggggagggaacacaggccatcgggcctggcagcatgggccacctgctgagccatctcatcagtccagcagtttttaaagcattgttaattttgtgtgggggtgggggtggtgtgtgcaggcaccatgttgcatgtgtgatgtctaaggacatcttgtgggagtcagttctctcctgctgtatgagtctcagggctcggactcaggtcgtgaggcttggcagccagtaccttcacacaccaatccatctcctctgccaacttattaaaaactgcattttctccagtgttaagaaagatatgggaagagagagacctcttgtatctatagtatcagaaggactatgaactggattaggcttccaggtaacctagagttagaaacctctttcttgattttatagtaaggaaaaacttagattgccctaaaacgtacagttagtaggatggatattaacaaacaagtctaaagagacctgttaagtagagtacatttctaaaatcaactcctcaatcaccttggatacctgtaaagtagtgacttactggtgtggaggaagatttgctctttgtaactgataaaagcaggtgaattttatatttaaagtagcaacacacattatttttgagacagggtttctctgtggctttagaggctgtcctggaactagctcttgtagatcaggctggcctcgaactcacagagatccgcctacctctgcctcccgagtgctgggattaaaggtgtgagccaccaacacccagctgagatggctacagtttggaggctagcctgaggtacagtgagactctctctcaaacaaagaaatgagcaaaaacaaaaaaacaagggctggagagatggctcagtggttaagaaaactggctctcttctagatgacccaggtaattcccggcacccacatggtggctcatatttgcctgcaaactccagtttcaggggatccaacaccttcacacagacatacatgcaggcaaaacatgaatgcacatgaataaaaataaataaacatttttacaaagccaaatctttaagaaaaagaaatcgagtatcatgaaatgagacacgctacgtactattacagtgattctcaacctgtaggacacactccctttggtatcggatatttagatggtgcgtatcagataccctgtatgtcagacatttacattatgcttcataacagtagcaaaactcaagtagcaatgtggttgaggagagatgaggtcaccacaacatgaagaaatgtactaaagggttgcagcattaggaaatttgagaactacttgtctactaaagttgccttggagtggaggctcgtagcctggagaactgtgacaatggtaggaggattctggaagcacccactgagtgcaatatcatttcaatattcaggagagcaccacaaagaacagtccagaacaaagtgacaaaaggcagggagggatatagcccagttggaagaatacttttgtcacatgcatggaaatgcgtgaaaccctgggtttgacccccaggactatataaattggttgtgatgacacatacctgtagtcctagcactcagcaggtgaggcaggagagtaagaagtttgaagttggtcagaaggatgggacagaactttccggacaagcctgacaacttaaatccaatctctagaacccatgttaatgtggaaggagaggctcaactctacaaagctattctctgatcctctgacacccttgtgtgtgctgggcacactcccccttacacacacataacgtacagcatcactatgcacgcacccacacagaagcacacactaacaacaacaacagcagcaataatgttttaaaagatgctccaggtcagcctgggctacatagggagtttaaggcctggggtacaagagattctgactctaacagcaaagaaggaaatcctcttccttggatctttcttcagccctttgagctctgaggtccctgacttctgtattcatgcacacttgctctccacctggttccctgtatacttgtaacttgcccaagcttccttctcccaactcggctgccctctcctagggagtatcagttttactgttcctttactgggacatctctgcccctggctctctcctgtggcttatccttatgcacagagcatcaagaatgaggatttagtacacaaagacagaagaagtttagagtatttgccagctctgccactgaccgtttcatgaactgcagtgagcaaaacccttaatcctcaagttaatttcctcccctaaaaaaccaggttagtaacagctgctccacctccctcacaggtatacagtatgtgagtgtgtgtgtgtgtgtgtgtgtgtgtgtgtgtgtgtgtgtgtgtgtgtgtgtgtgtgtgtgtgtgtgtgtgtgtgtgtgtgtgtgtgtgtgtgtgtgtgtgtgtgtgcgcgtgcgcgcacacgcgcgcatgcgtgtattcacataagtcctatgggagtcatgaagctgcaagagcctggttaccctgtttctactctgccattatacatgacctccctgcatcaattgggggtaagaatggttatgtgtgagcttcagctaatcactgctaatgctaacagtatcatattatcagtgctctagtttctactgtgatttactaacttggtaacgatcacatttcattcaaaacaagtacagcctttgtttttgttattgttgttgcttttgtctttttttttttttttaattttgtgagcatgtacttctggaatacagctgcagcagacaattactgagcatgtaccaaggcaggccatcctaaagcgtttcacaagggaggccagggaaactgaggcagagtagccttcccatgatctaaagccaggcatcttactgtagagcctgcacccttatgcactgtcctggaactccattagtgatgaccaaaagagacagcatgcggatgtgactgtctctagaatactgggtggaagaggaaacataatcaagaacctatggtatctctaaaatcaggacatcattattcaaattgcaacctccaagtgctgctgggcattgtcagttacttctgtatcccgaagtcacagagcttcattggcacagctttctgaaaaccaactagaagagtgtcccatctaccctgtcaaggccatggtggtagcaattcatcctacagaaataatcatacatgtgtatgaaaaatactcccaataaggaagcttctaaaattatagaaagagaagtgttgtgtacagccaagaaaaggatacacagtcatgtaaaatggcatgttgatgaactgtgtgtaacagtctattggtggggcttactatctccctagcccaagtttacaagcatggagagtgacttaatttcccaaagtctcacttttcttaaatgcaaatggtgacaaaagtatctcacagcatcatggagagttaacaaacggacaggccggagagacggccctgcacaaacccaatgacctgagttcaatccccacaatccacagtggaaggaaagaacccagccctgaatgttgtcctctgacctttgcatgcacacacgcacaaacaataataaaggaaaaaagaaataatttttataggagtcaataaattaacgcctccaaagggtatggtgtggaggctggcacagggcaagactgtggtaaatgtcaatcatttctaagccaatctagtaaatgaaccacacacactaaactgggaaaataacccagtgaaatgttaacatctctgaaagtaggacaatagttttcttttaaattccctgtatttttacttttgccttatgaattaaaacagcaatatattattattttaggtatttccatttattttaagtagccttaataatacttctcttgacctaataaatttttctagtataatccagcctgtgcatacagtgtttatggaaatggaatattttattgatttaatctgaggagtaatatatttgacctccatttttcagcgtcaaacagcccgctcatatttcaccctataaaaatattttctgcactcttatacattttcagattaagagtgttctgaatggaatattagaacataaaaacctgtggaagggaatagattgatgtctgtaaaaagtaaagttataggagacaaacacaactttgtgatggttataagataaaaaaaagtaaaaagcttaccttaatcaggtaaggtcagaggttactgcaataaacatttcagctccacagacaacaccctagtgtggtcaagagatgggcgtaattcagtagctcagctgtccctccagtatgatgacaatgactctgaaagagaaaagatctcaatgagggacgcgagagggctcgatctcctttctaggttgagagtgacaggtggggtagtcaatgactggggtcagctgcacatttccgaatcaaacctcaactttcctgctgggagtgggggcagaatgaagcactgaggaaactgcaaagcccgtctctgctctaggtaaaggctggctgccactctcacagtgatttactctttcaaagaaaggcttggtccttcaacaccttccatccttagttgttaccattcttctgtgtagttgctaagatacacataggtcagctcatgcattatcccactgatctttccacggtttcctgtcattgtacactcagaccactcgatcaccaacactctaagtggcagtttcctgggataaaaaccttgagactgtcactcaaccatgctctccactgcttccaattccaacaccaccaacgttccttgaacttgtttcagtaacagtgacgtagtaacactgcctgtgtctatgacttcttaacctgtagcctggacccttcctgtagattgccacctatccactctcttcctactacctgtgcaaccttgaaccgattgcccttgtccccgagctcctggttttcttgactacacaatcaagatcgatgccagctttcacaccctcattgctctaggacatcagaggtccctagggcatgaatcgtgctcctgccactctgcaggatataaccaggttatgtctgttctgccaacaatctcagcttcgctatgaataaaacgagaatgtgcatcccagcggccgctgttaaataagaacagtacaatcatttgtctggcaggtcccaccacaggtactcaacagcatagccattctcaacccactttaccaaacaccaccaaccctgaggctctctagccttaaaacttctgaaacccaagtccccttttacccatatccttagtattaaagattttgtcttctgctaaatataaactcctctgctggttttcagttgtcctatgttttactgtccactaactatgtgctacgggtttccaattccatctgttccagtgagcctagtccgactatcaaaaatatgcacttacaccctgcctctgtaactatcatgtccccttgtgaggtgcatgctaggctttctggccccagcaatgctcatcatatacacactgtaaccctcacatcacacaccacttaacatcactgtccaatgtagcactgggtatcgagtttaactgtccagctgaaaagtgattattaagttttacacttcaactctcttctgggtcagttctgccaatgctctttgaagtcaacaggcctttactaagtttcctttactaaaaggaatttgaaagtttccaccatgaagacatattaaatgtttgaggcgatatatctgcctggatttaataactcacaacatatgtgtgtttttaaatatattgctacccaattgcttacaatttttgtgtgccaggttcaatcaccagtggataccaggcacatctaacctgctggatcacataggtcccgagatacatatgaatatgctggactttgagaggcaatgtcagaaggctgggcaccacttagcagaccattccgtctacggattgtctcatggagctaagagatgagttttacgtatgtccaacatgtgttagatttaatgccacagtaatcatgctctaatttcaaatggagtctcataaccaagctctcagcataactgacaataaccggccatgggcaaagatgatgggtgactatagttttattccaaaggtgatggataaagaactaaaggaaggccaggtagtggtggtccatgcctttaatcccagaaaaagacacgtggatctctgtaagttcaaggtcagcctggtctgcaaagcaagttccaagacagccagagatatgcagagaccctgtctcaaaaaaccaaagccaaaaaaactaaaggaaggtactgagcagggataagtagaagatttagtgaagggccaagggatgcaggaagagtaactgatggaggagaaatggaaccactacaaaggtgagagaaccacgccagcagcagagtcacacagcgcagagatgagcatggcatgatggaaactcacaggaggcttcagccttgagaaacaggaagtagcgggtgcagttttcaatatggctgacccaggatgcctgtggcaggagactgaggagaaacaaggagggcaaatggaaacagtagacttgcttgtcaagaactctaaggttgactgccggtcactttcaaaacctgaagtctgcctggcccaagatcctgataagaaacacctctgtgtgagaaatcctgacagaaacaacttagagaggaaagccttatttggacagtttcagagggtggagcccctaggttcacttcatgggggggggcaggaaacagagctagctggatatggcatggtgtgtgatgatatatgtaccccatgggcacgatacttcctccagccagctcccagctcctaaagtttccaccgtttccaaaatatcactgccagctgcagacactctggtttcaagctgtcaaactctgctctgccaacagcaccctgcctgcctggttttgtctgcctaagaaatctcacagagccattcagcattttgcactgtcaactcaggagagcaggcatttagtctactgctgctgcaggaatgcggtggatggctactcacacagataggatgctttgtcagactgacagcacaacattaggttattaatatagttaatgctcagttatttttaaagtaacatcttttcatctttcaaaatagtgtttgttctaagataggaggtggtggtacacccctttaatcccagcactcgggaggcagaggcaggtggatctctgtgagttccaggatagctagggctgttaaactgagaaaccctgtctcaaggtaaataaaaaattagtgtttgttctcaactgtaagtttagaaaattcaagagacaaggctttttaagtgccattagcatcttgttgaatcttgtccctctgtggtatgtttgcaaggccaatttattaacgtaatacacaaacaggaattatctgacattatttgtaactggattttcccatttattttaactacgtcaaactcagtgtgcatgtgaagctaaacacattttacctccttatacttcttgttcatgtcctttgtttatttttctacctgagtgttccccatctggatttacaccatcttgttatatcaagggcattatctacttgtaacctgactgtacactgactgactttttggttacaagaagcaaagtctactgaagcctctgagtctctgaaaggaccctggtgtgggtctccagaagctttcttatgtatgtgcctatgccttgctgatcctttcctagcttatggttttctagaagagcagcatctccacgttactggcctatttcaaagaccacagaaaatgaaggtaagttcatgagtcaaagtaatcttcataaaaagaaatgaacaaatgagatcacccccacttactaaaagcaactggtgcctttttcttccaagcctttatcaggttgttaggtgagcactagcagtctcttttacagacaaacacgagagagagagagagagagagagagagagagagagagagagagagagagagagagagagagagacagagacagagacagagagacttggtcatgcagggaggggacgatggcatactaaatgcttgctacacaagcatggggacctgagttcagatcccccatgtaagagcaaggcatgacagcatatgttagcaatcctagtgcttgaggggtgaggtggagatggatggagccctgggtatctctgaccagactgtctggctaaagtggttaagctctaggttcaataaaagagtatgctttaagaagtagggggataaggacgacacacacaagtcatatactgattttaagactcttctcagctcttctgggtttctcaattgtaatgccagaggctaagcttcaaaacagctcctagctgtaacacgaaaaataaaagacctagagactgatattgggggttcaagcttcaagctgatgttcaggaaagcaaagcagccaagccagtagatcttacctctacccagctgaaatggcaatcctgtctccacaatcctcagaggcaaaagctctcagttcccatctcctcctccttttattcctttctctgcccagccttatcactcccgtctccacctccctagtgctgggattaaaggtgcctgatcccaggtgctgagatcagctttgtgtgagcttcttctttgaggactggatcaattttgtggctgtttttgctttctgaatcctcagggaagctttaataagtcatgactcaccacacctagctcctccatccattctattcagcacctttagtaaactcagtcacaggtaaactcacttctccccctttatgtttcttgagacttaagggtcactctgagaatatacaaaaatctaaatatttctggctgagaaccaaggccactctctcagcaactacaaaagcaacggcaaacgctttcctttcttccaaaggtcctccagtggtttatcggttagtgatgtccatagtaacggtgcataccatagtaacagtgcatatgcgaacccttcctttgtcaaaggtgaagcacactgtgctctataaatattttatgcacagcccgtgctacaactctagatgccaagggcttaacagaattctctggcaaacactgtttctatcaatgccgagcgtgggctttgtcatcctgcagatgtcttggacacttagcactaattatctgtcttattttttactgtagtagctgtgctatgggcaagggagaaggatctgaaactaggacaaaaggaggcagctgacgactaaacctgatagactcacagctttgccgaggcctgagggcaaaagttcgtggcagtgtgaccctgggaggtaggtttttatcaaagaatcttagtggatccaagtgactcattggcagagagggaaaatacatacttggattgacctggtgatgctctgaagacaatgctagaaatctgaaggctaatgtgtgcaacaggaagtttccaaattggctttgggaggccagatgtctcaaattcccctgccacctgatggcaggtacaggcccatgcatctcaggagtcataagcaagtacagctggcatccccacagagcgatgtagccacagaagctatagaaaaagaaatgtggctaggtaaactgaggaagcatggtctacggaccacttggcagcacctaggcctgaggtagctcatcactgacttggtggcaggaaactctctcagtgtttaaatcccagttacatatagctctggcttcctagcttcagggaagctacaacagcatagccacatctgccctctggctgcacccacaggagaaaggtcagatgctgtatacatgtgtggtcaactatggcatcaaaaagtggtccaaaagtggcagggaccagtatcaacaaagggcccaaagctcttactgacactgtgacatgcaaccatgcctggaagcttaacacaacctgtcttagggttttattgctatgatgagacaccatgaccacagaaactcttatgaaggaaaacatttaattggggctggcttacagttcagagatttaatccaatgtcaccatgccaggaaaaatggcaatgcacaggcagaaggagctgggagttctacatctggatctgaaggcagcagaaagaatgagtgagccaatgagcctgatttgaatttctcaaacctcaaagcttgcccccagtgacatacttcctccaacaaggccacacctcctgaaagtgccacttcctagggacctatgggggccattttcattcaaatcatcacacaaccccaggagggaaatgtgggaagagtctcagaacaccaaggtgaaccttgttacccaaagagagacgctcactatgaatattaagtcaacttaggaaaattgcaataatcgctgtacctctggtttgtggactaagactcacccccaaactattgactgaaaaaaacaaggagaaagggagggttcaatgcccagagtctgtatttcttagttctgtgctgttggctttcaacattctcattaagggaggcttttaaagcagacagacaccacgaaaaggctttgaccacgaagccattcactaaaaaattaggttcacttgttaccactgtcacgtcgaaggcatgcactaacagagacaggcatcactgaatgcatcaggtactgacagccacagggcctctggaacagagaaactaggaagagacccacactccctctggtttaacatcagcctagagcccacagaggtcactcccctagagtggggttaatggacagatcccaaacatcatgctaatggtatgtgcagggagaaggcctctgtcttttctgtggtcttttggggtttgctgatgaggccacagtgtcaaacaaagttcatcctccgcctcccagcatactccctacatcctagcttcatttctgttgatgtgacaaatagcctaacatagggagtgaaaggcttacacaacactgaactgcagagcactgaggacagtaggttttctctgagtatttcgggatccggataaattcattcctacgttgggtttgttccttgtagcaaaagattcccagtagaaccaactcttccatgagctccgtttgctatgtgtgctgggagccctaaagcagggcagagcagtaggggatggcagggagagatgcacgatggagtagtgcctgcacctgtgaatgccagaggccgctagctagacctcgcctccccccagacacaggtgcttcacctctcagactttactcagtaaactctgttctttgatgctgtcaactgaataccatcacacactttccaaacctggcatgtagtcaactcctgttttcagctgtacacattttatcaaatccatatggaagacttctccatcagatggctgactagaagctgccatgagacctagttaaggagaggagtgaatgtaagaaagacagctgggcgtggtggagcccacctttaatcctagtgcagcaggcagaggctcgtgcatctctgtgagtttcaggccagacagagctacattgtgagatcctccctcaaaaaatagttctgacaagaaagtatggactgtactccaaagagaaagagctctggaaatccacagagaccgtgactgaagaactgaatggtatcgataaaagggtagctaatactgcaagaatccaacatgaacacagttccagtgttttgggtccccaacaggaagaggggaaacagaaaccccatcccaaaagagtttacattcctttctgtgaatagtgttagggcctgagccctcaagaacaggatgctcagtaagaaagaaccctaaattaaagtgagagagatatcaaactaacagtgaggcaaatacaacacagaaactacacacacacacacatacacacacacactggaaaaggcaacatgattccaccagaaacgcacacagaaacaatgtcaaatataccaagcaaggaaatgatatgaaacattccaaagggaaaacactaaatcacccccaaacacatcagtaacatcaactatctcattggcaacataaaagcatggaagacatggaatgacatatttcagactctaaagtaaataactcccagttagcactgctctagccaggaaactgcccctcaaaatagagaggcagtttatgatcaagccagcactgtagatactatatgggagtaagaaagccagcactgtagatggtaaaaggaatactatacaggaataagaaagacagtctcaattgtaagggcacagcagagaatgaaattcatgagagaaacagaagcaagggaaaggtaggaaggaatccatcatgtccaacacagttcaacagaggaagctagtctaccaagcaagcagaaacttgaaacaggctggaggattttggtatctgataaagtagaacgcacaccaaaattagaggagattttaaaaggccattacaattgcaaacatacatatgctgaagatcggggctcccaatttaatattagtagccctaaaaatcagctcagtcctgacataatatcagtccatctcagttgggcaatggtggagcatgcctttaatcccagcacttgagaggcagaggctggcctggtcttgttccaagacagccagggctacacagagaaaactcccagggggtggagggtgggagtgactagtccatctttagatacatcattgaaactaaaaatcaacaaagaaatttcagagttaaagtcatactactgatcaaaggacttaataaggtacctacagaatatcccacatattaggtaacaaagtacattcttttctgcagcccaagggaccatctctaaaacagactacattctaggacacaagaaagtcataacaaatacaaaagaatccaaataatgcatgtatcttatcagatcatagtaaactaaaagacagaagccaatagcaagagaaacttcaaaaactaggcaaatgcaaacactaggaggcacaggaccactgtgtgacaacttaaaaaaaatttaagaattatgcttaagtacagtacttctcaaatattagcatgcttcaaaatcgcccccagggtttgttagatcggttggtcccacctccgaacttctgactcaagaggtgtggggtggagcctgtgagtcacgctcctacaacatccccagatgctgctgcttggagtccagagagcacattttagggaagcagaagatgccagctctctgggagacgatgttaactgtttagagatcctttcaaacactgcacatctgagcacttgctacccaggcaggcaaaggatattaatggctgacaagatagggtccctccatctgaaacaaaatcagtttcaggagaagctccaagtttatctcgaggcctcccgtatctgagtcgaaccagcatgcacagactctgagtgaaattttatctccctcagtgaccctcagcaaagagccaacgcagacatcagggctggacctgagaatgacagacagctctatgaagaggaagtgctacagtgcaaacagggcagagtgactcgaccccctgctaccccctgcaccccctaaggctacctaagcctgtctatggcagtcctcaaaggaggctgcttccatggctaatggcatggagaaccagggaagtctatcaccagtgcagacctggacaatgaaactatgcagtggctaaaaggatgcttctagtctgtggctcacaatttttatcctatcagaagtatatggagacttttgtttacctgtttttctttttttttttttttaaaccattgttggattcatccttctagagtgaacttcctgagtctgggaagcacctgggaataccaggaaaacctctctgatgatgttcacagtctggtccagagatcacaacagagagctacttgttaagccatagctcaggccactgtcacctaagcaccagttctgccagtgatcttattaataaacataaagaaatccctcataggaatgtggcttttgtcaccattatgtgacagacctcaggcatgtcctgtacaggtgccataccctaccttcccattcctaaatgaacacttatccccagactgttattaatcccccactactatgtaattttaaagacattactttgtattagaaactgcttcttctcttagaatatttttcctggcttaatttaaatacattatgacatttaaaacagggtccaaagctcctcccccaaaaaacaacccgtgggataaagatgcaggagccatttttgtttgtttgtttttgttgctgttgttgttctaagctaaagctttgcaaatgggagccttcttaaaaaatttttaaaaagcagattctgaaactgtttttcaatgttttcatctttccttattaaaaaaaaacaagtatgtgatgttatatagccaattaatacaggtttcacctgaaacacacacacacccttcaataaagcattacaacctaaggtttctcccatgttgttcatctcaggaatgtataaatgtcctgcttcaatccagggggaaagagtgggaggcgggggccggggctctgctacagccccgcccacaggacttgggcagtattgactgacagactttcagcagagctccaatgctggtctttcagcagacacccatgcccaccctcgtgctccttagtctttagggagagttacaagtgtcaagcttctgcttttcccgagaggagaggtgtgaggtgagccctccaagtctctgtggccagagaacaaagaccacatgacgggcatgacaactctgattttataggctaagactccttccaccacaaaagacaaattcagattgccggggcacacaccctggaagctctgggctgtgggagatgggccagcccactagtgccctccccagctcctccaaacaccttcccttctgccctcagcctctaattaaagttagctttaggtacagaaacaagcagctcattgttctgtaagccaacagcacacctttccaaaccatgcactcagctgtgagaaaactgaccttccaacttcagccactattttaaagtgtgtgtgtgtgtgtgtgtgtgtgtgtgtgtgcaacacacatatatacctggtgctcatggatgcaagaagatggcaccagacttcctgaaactggagttaccgatggttgtgagctgggaacttaagccaggtcctctgcaagagcaatggctcttaaccattgagccatctctccagccacatatcagctacttttactgcaatgaaataatgtctccatcttctcactccagatttggaaaacaagtattaatgactaggattggggagctggggagagaaggctttaatcatttcaatcaccttttagcacattggcatccatgctacactccctggtgccttccttcccttgaagctcacagcctgttacttccagtttaaagaagaaaatcatgatcctaaacagaaactggtcaagcatcaaatattccaggtccttcacattgacaaagtatgtttttttttggggggggtagtttttggacacagggtttctctgtgtagccctggctgtcctggaactcgttctgtagaacaagctggcctcccaaagtgctgggattaaaggagtgtgccaccctcacctggtgacaaagtatcattttaaattttaatttaatacatttgggtattttgcttgttgtatgtctgtgcatcgtgtgccagcagtgcccctattggccagaagagggcaccagatgcccagatactggcattttatagagttgtgagtcactagatagtgctgggaaccaaggccaggtcctctgcaagagtagccagtgattttaatccttgtcatattacctttcattcttcagggaagactgctctgtggtggtattaacccaggaagcaccctaattaccatggcatcagacccaccccttcctgagccctgacagccagtttcttcttcttctgccagtgactaaactccacagcagttattatttataaaccttgctgggagaaaagggaacgcccctggattagcacatatactgctgcaagatttgaagagactgccaagaatgcaaaagcaagtcctgctgagtccatctacccagcatccccatcctgttacagcaggagacagtgtctctgggattactggctacaacacaaagtcattctgccacaaacagctttcatgtcctcatcagttacacaggtactcatgcaacaacattaacattttaaattttcctgctaaagtgggcgtgccttaaaaacacgtaactttgtaatttagtcactattacacatataagcctgagatgtactagtgggaggaaaacatcagcttcttggtttcaacttggtaaaactgaactactccactgggtgtagtttacccagattacaggctgcacacatctgtaatctcaggactcaggaggccaaggggggcagccatgaatttggagccagcctagaccacataggtaataaactgtctcaaaagcaaaatcaaccaaaaaaacagaaacaggtgtctccacaagaatgcctgccgacaggtgccctagacccacagggaacctgggcagaatgtagtaaacttaaagacttgatttatgaaacatgaaactaaggagctgaactctaccaaatacctaatttccctataaaccaatatttctctctggataatttatccactgcctttgaataaactgtgctgtttttctaataaaggacactgtgtgtttaagattgtcagcggaacactcatatcacaaggacatttgctcaactatgttcatagcaacactacgaataatagccagatcttggaaacaacctagatgcccttcaaccgaagaatggataaagaaaatgtggtatatttacacaacggagaactactcagaggtaagaaacaatggcatcctaaaattttcaggcaaatggacagaactacaaaaaaccatcctgagtacatacaaatatagtatgtactcactcataagtggataccagacttaaagcaaaaaataccccgcctataatccacaaccccagagaagatagaaccctcttccagaaacagatagaagcagacacagaaatccacaaataaccagtgggccaaactcctggagtacaatcgaagtgagggaggagtgataatatgagcaaagggttcaagaccatgatggggaaacccaaagaatcagctgacccgagctagtgagagatcactgactcaggtctgacaaatgggaaccttcataagactgaattagattccctaaatataggtgacaatggtgtgactgggacaatatatgaggcactggcagtgggttcaagatctaacactaatgcacaaactgacttaatagagccctttctatatgcagagacaccttgctcaccctagtgtggggtggaaaggtgccttggtcctgccttaaggagatgatgggacagacttagtagacttcctaggggaggccttattgtctcagaggaacagatgggagatggggttggaagtggggaggggggagtgggccggggggaactgggaatgcaatgtaaaatataaattaaaaaaaaaagtttgtcagccaagaccctgaatgccaactgtattcctagtattcattcaaaaaagccaaactggggctgaagagttggctcaaagtttaagtgctcttgttgcacttgcaaaggacctgggttcagttcccagcacccacatagtggctcacaaccatccacagctccagttccaaggaatacatcatcatcttctgacctcagagggcaccttgcatgtacttggtgcacatacatacatacatacatacatacatacatacatacatacatacacagatgcaggcaaaacactcatacacataaaataagtatatctattaaaataacagagtttaaagcaaaatgaggcagggtctgggtgtgttagccggttggcctagaacttgggatccttctccttctgcctccagagtgttggcattgcaggcctgtatgtacccaccacagagagctctaagttttcaaccttctgaagccaattttttttgccctctaaataaaactcagtaaggaaataatattcataaaaaatatttacagagaaatgcatttgttgcttacctcattattgtaaaagtcagaaacttaaattattaggcaagcatttaaaaagttggtgaagtctagcaaagaactatgcaaatgggctttcaagctaataaattcacatttaaaatcaatacaatttgctacctagtatgtatatgtgtgtatacaagtctctctcttcctcccccccccccacaccccaatctaaattaatggacacagatgatttttaaaaggaaagtgaagtctccaagcctgaatttccataataaatggtgctgagaggacacatccaggttttatcagcagcattaagattgtcctgcctttcagggtgatgaatgccctttgacagatgggacctcctgataaaaagtacctggggacccagcctaggtcacaggttatgtttctggggaccatgtcttgatttcttttccttgtattgggtagggcatccaccagctgagccctctgggcagccagacagtataactcaacctcaaagctgttcccttaggagtcaaggcttcatggtcacttcgtactcaagatggcaatcctaagccatctttatattaataacttgtttcaaatgtacacaaacatagattgtatgagagcatagaggagttccataaactcttgcaagcaaccatgacagaccacacactccaagcacaaattaagacaaaaccatgacagaagtgacgggcatttgcacaaaagaatcccaacacatgaaaatcaaattcttctcaatgactatagattgaaacacaaatccagttacatggttattaagaaaatacagaaaggcttaagagcaaagacagtacagaattaaagaatacctcccgtgaccaggagaacaaagagagatacaagcttggaggaattaaagagaactacctgcccaaatgagaacaaataaccaatctgtttgaaaagggtaacaatgaataaatgcactgaacaattacaaaaacaaaaaaaacaaaaaaaaaaaaaaaacaaaaaacaaaaaaccccacagaaataacaactcttaacagcttctcagaagttccacccaaggtaaattgttacagagatacaaggtgcaaggaggagtgagtcacagggctcctcacatctctttgagtcagatttgacaccaggaagaaaaggccttggaagagtggcagggaggcaggcatacaggattgggtcagactcatcctaccgacagagatactgcaccaagggcctcctcacacagaggacttggggagacacactggtgcaatccttaccaccaggcaagggagcactgacagtcagcaatggcagccaaaagcaggctcagatttaaaatgaatcaacttagtaaaatgtatcaagtcttcaatgtggatacaattctgtttgatttgggtgagatagcgtctcactttgtaacccaggctgaccttgaacatacagtcattctcttgcctcagcctctcaaatactgaaattaaaggtaagaaccatcacatctggcttacaatttattttaatgttacttctgaccctataattttgcagctaatagtatatagtaaggaaataataacattttaaaatacagtcaggctggagaggtgcctgctctgttgaagtgcttggcacttaagtatgaggacctgaattcaacgccccccccaaacacacacacacacacacacacacacacacacacacacacacacacacacacacacacacacacacacacaatgttaaagagctgaccacatgctgttcgaatgcctggaaccctggtgctgagtgcagaaacacagatctgtgagccttccgggccagctagtatagtagagttggtgaactccagattcagtgagagactctgtctcaaaatataaggtgcagtgtgactgacaaagacaccaagataagacagacctgtagcataatggcaaagttttcaaaaccttgatttttcaactactacggagacaatacacatttatgaagattctaagagggggaaataagtttggttaagctgaaaaataggcacaaaaactaaggtcaagaaaaattagaaatgaccagagaatttaaatggtttcaccttccatctgaagtctatcaggggaggttaacttattcttttacactgacctatttacatggggagtcaggaggcctagcatggcacagcatgccagtgcaagtcagaagacacagtttatcaactggttctctcctcccaccatgtgggttctggggatcagactcaggtggtgaagcttggtagcaagggtctttacctcctaaatgttgtgtgaggaaaaaaatgtacatttttctcactcaggatccaacccttttcatgcctggctagtctacagctatagacaaaaatgacttaatttttttgaggtgaggagtagtttgcttgagacgggtgcgtgtgtgtgtgtgtgtgtgtgtgtgtgtgtttgcctagactacgcagcccaggatgaccctgaacactgatcttcctgcttctaactcagtgctgggattacaggtgctcaacttaacttttgaatgtttttcttcctccctaagatgggaatcaaagccagttaaaactacctaggtttaatgccatgaactacccaaatgtacaggtttagcaggcaggcatctggtagccaagatgctttagcaggaaccaatgtggcactaaacctccatgaagaagtggcctacaaaagtaccacttccagaagaaaacctctccatgaacaggtaggtttcatactcccaaccacacttcattttgatgggacctggaagaacggttaggctttgtagaaaaatcttttaaggcctctttgtgtaccaggctagatgggagcaactgtaagtcattgttcagcactcacttccccattgtaagggcccctgacaaagtcctaaagttgaggtgctaccattttctcgacagcagtcccaagtcagtgaaggtaggaggtcatgaaggctctgtatactgtgaatagtctctggtttactataaatacaaaaaggctgcttagcctctctttctggtcttcacatgggtcatgggtaacacagaggaaggcagtcactgcccagttttctcaggctccttcacagtggagagccccacacactcgaggtggcagccacatttgtgccaggtggctatcctctttgaacaaggccacctgtatggaccagaatggatttgtcgggagaagccaaagctgatgagatcacgtgagcttatctgacaaggtaaggtgagcttagaccatcagctctcaacaactcccaggaatttgggtgaggaagcactggggatatctgctgaaggtgtgagacttgtgaagaggagccacaaaagatgcaaagttggatgaaaactcagataatagaactgccaaactgttggaccaagcagagggtggaacgccactcgcccttgtggtagtatctaatattaacgaagccatcgtggctcccagtacacttaaaacaccaccttctccatattcttgtgtcagcactgtgttctagtttgatttgtttccgtaataagcattctgaccaaaagcagctcaggttaggaaaagacatactatcttacacttctaggtcactggccatcacccagggaggactcgaaacaaaacagaaactgaaaacagcaactctgctcctggctcaagctcattcagcttgtacctatctagggatggtaccacccacagtgggcaggccctcctccatcagttaactactaagacaactgcccccactagctcagacatgcccacaggctgatctgatccagaaaattttgcaatcaaggtttttctctcagatgacaccaggttgtttgtactaggttgacaattaaagctaattagggcacagtacaactatgtgtgctttatgttattaacatgaaaaaaaagcagaccatgtgccctctctatataggcagacatgtgtggctcatttacaaattgtctacattgagggtgtggctcagagtttttgttgaagataaaggcataatttttttagtatatttattcactccccccccccgtgtgtgtgtgtgtgtgtgtgtgtgtgtgtgtgagtgtgtgtgtgtgtgtgtgagagagagagagagagagagagagagagagagagagagagggagagggagagagagagagcgagagagagagagagagagagagagagaagaggacagttggtgccaccatgtgagtccaaggcattgaactcaggttatcaggcatggcagcacacttcttggcctgctggaccatctccaggtctctcaaaacatttttatgcttagacttgacacagaaaatgcattttctagcacactgagtgacagaggttaggacacttgtgaaggattatgacaaagaccctgtgcttgtcaaggagctcaccagcaacaatgtgtaacagaaaagaaaaaaggcaacatgtgtgacatttccctggagtctagcaatgttctcttagtacagatgtgagctccgcttcagcctaggctcttacatcattctccagcaacaaagttactactgatcaaacatactgcggggccagtgctccctaagcatcactggacacactacacttactctttttctttttttaatggaccatcttccaggaaagcacaactacaactgcgttgaatttcattgatgcttttttacccaaagaccagggacaagaaatgattagttctactcttttgttttaacatataaacacacataataatcatactgtcctaaacttacttggggaagcttagtcataggcgtctctcttcagccacatcatctgagtggcagtgagagaagaccctccagaagaaaatctccacttctattctcaagcacaatgcagagaactgacacaatgtcactcagcgacacaacggctcttcagactttgcagtgaatggaacactcattattaaagaccaaacacaatgcacaaagggcagagacagccagagttgccatatcaggaactcagggacactggcttcctagcacatcagagtttgacagatgaaacaaaaattatttttgataagggtgagtaaatcaagtctaatacaagattgcatccctctgtgctaaaagaatttacacaacaggaggcctggttctatcttttaaaaaacaaaaccaaaaaaacaggaattaaaataacctgagaataccaggtgcggtaactggaatcagctgagatcaatcggcctcagttcccccattttaaagctaagagtaatagggttaatccccataaagacaagtacatcttttcaaggggggaagcaatgaagatttattgtttcatgtcgtcaggctacagcccccatatattcttcttgcattcattcaacaaatgtgtagtgagatgcagctatgagccaaaaatgagaacagtaaaattagaatacctgttcttgatgaagtttattagcttctctgtccattaggaatgttccagtagccggcaaagacagccaatattcatgtggtggtttacagattaaaaagtactgtgtatgcgccactgcatataatccccacagtaactttgagaaatgtggtaactggtcatttgtctcacttacacactaagaattcaaggcttgtggaggtccagtgctcaccaggcaatgtgcctgaatctactgcatagagaagccctccgatccacactgtctatgaaggctgagcctgggggctgcagggacaaaacatgagcaaaatgaccctggacttttgcctgattccagtccccccagaagcaaagctaactccattctgggactgtatagaaacaagatttatttcacagaagactgacatatacaactctaatctctgccactcgggaggcagaggcaggtggatctctgacttcaaggtcaacctcatctacagagctagttccagaacaggcaggatgcacagagaaaccctatctcaaaaacaaacaaacaaacaaacccctgacttgtataaataaagcaacaggtaaatatccagatgaggtagccatgtctctaaccccagcaccagaaagggggaaggtaggagacttattagttcaaagtcatccttctcagctccttagcaagttcaaggacaacctgtctcaactagaacaaaaaaattaactaactaatgaattaaataagactaatccactgtgtgacccccttctctggctgccctgtgtctctcttttctggtcgatttccacagagctctttggatgtagcattatttttctagtgacagatttttttttaaatgcatatgggtgttttgtctatatgtctgttcaccacatgtgtgcattaccagtaggggccagaagatagttccaggattccatggaactgaatttacaggatgttgtgagcagatgtgtgggtggtgggactctaaaccagcctctactgatggatcttaacaattagatacaaatccctcctatagcatctctgacttgggttaccagactttaacagatcctttcataccactaggaaggcagttcagcatcaagcatgcagagccataagtaacagtgaaagaactaacttcaacctgcattccattttggggaatctgacccacattcttcagtgaaggtcacatttcccaaactaagattcttcgtcacttccatttgattggatgaaattccctgggactggcattacagatgactgtgaactgccatgtgggtgctgggaatctaacctgggtcctctagcaaagcaaccagttctcttaaccattgagctacctctatatccccaaagacattcatataaatgtcattaaagagatttataaacatgtaaagatatacaggctcaatctaataaaaagagcaactgctaataataatatatatgtttatgtatgtacaggaaaatccttaaattagtgaagtgagaaagcatgccctctctctctctctctctctctctctctctctctctctgtctctctctctctctgtctctctctctctctgtctctctctctcattttgtttttcaagacagggtttctctgtagtcctgactgtcctggaactcaggctggccttgaactcacaaagatctgtctgcctctgcctcccgagtgctaggattaaaggcatgcacctggttctcgggcacttatttttacaactcacctacaaaccatcttgagaaactcagaccagcactcggctttattctggctttttctagaaatgtcattacctcaatgttctctgcaacagggaactgagtttcaaaggagccagaataccttagggggcgctggttcttggggaactcatgaggacttccttctcagctaaccttgaaccatccacccctcccagccacttccttcactcaatgatctcaatgatcatgcctttcctcctcctctcagagcacttgtctagaaaatactacctgagagagaagctcctgttctaccagggaaagcctgacacctccacaaacaactacaaaaggccaaggaaagctccagaagggaagcactagtgtacaggaaggaatgtggtgtcaggcttggggcgcaggcatgaagaaggcaaaagccagacggggcacacggtggagacatctctgtgttaaaggatgcaactgagacttcagtggggaccacctagggccttctgggccatgcttagaaaacccgaggcattttctatttcagcaaattactgtggttcaatttcttaaaaacactctttgtcaggctggagagatggctcagaggttaagagcactgactgctcttccagaggtcctgagttcaattcccagcaaccacatggtggctcacaaccatcccttataagatctggtgccctcttctggtgtgcagatatacatggaagcagaatgttgtatacataataaataaataaaatcttaaaaaacaaaacaaaacaaaaaaccagtctttgtcttttcaatcatttggtctttctcctgtcttcaaagactgccaacagaagtctacaaatcagatgatatacatattctctttctgacaattttgaataattctgaaatggattacctttgcaagactttaaagaatgctaagatgtgataaaactgggattgaacattcaacctcagttcaagtgtcgtccatatgcagtcacctccctcagtctgggttgttttaatctttccaattaaaaaccatcaaccctaagttttctaagcttagaggaaaaaaaaattaaaagactcagcatgagtcaaagataatggttactgtgaaaactcagcacacaacaaatcaatgacaactacaaaactactgcaaaaaaataaaaaaattctcagtgaattttggatcaatctgtaaggcataaaaaccaaacagacaattctcaagacagtacctaatctctgagaaaaaaatgttcagtgcccaccagcaagttttccccccaaagctaagaaaaaatacagatacctatacataagaactacatgaacaaaataagtaaaaaatacttttaacatcattaatagattctctatttacaaattcatctgctcattaaaatttatttaaatatgcagatcacccaaatgcttgcatcattcctcacagattcccagatgaggtcaaatggagttctgtctaccttctttctgctccctggctgtatgtaaatgtcctttgtcacaacccttgaagggcctttgtggatgattttattgtccagactgactttctcctccaacttctctctggaccacaataaaccgttggcaccttgcttccttgacatgtctgctacctttatgcgggtccagctacaaacacatttccttggttgctaggtagcctcaggcacctcagactgtcttcttaacacacgggttgcattatttgtgtgagccatctcctgaagcatctgtgtcttccatcacatggttatacctgcatttcggtctgttttaaaactcatttttcaatagctacccaaaacaatcccccacctgaaagtctaggacgtggatatttcctccactgttgctcaaggagcctttaaattttctgatgtgacagttgtatacacagatacaaatacagacagagtagacacatataatgagaaacatatgctaggatcccagagctccattttagaatctgctattacaaaaaaacttccaaaacgtgtaacaacaaggagactacatatgaattcaacacacatgagctgcagcaagtatggtccttggctactctttttcatctagtccttttctgttcagtttctttggatttatttttattttatgtgtatgaggatctcatgtgcaccaagtgcccagaggccagaagagggcacaggatcctctgccaaaagaagttacaggtggttgtaattgccatgtggggagctggcaatcgaacccaggtcctctgcaagaggagccagtgttcttaaccaaggggccgtctctccagccctttgctattacatcttagagcaaaagtaagctctctcttaacctttaagaactcccttttcataggcaataaagatgtttgctttaacataaccacatcattatcaaacctaagaaagcttgtgatttctcctgacggctgtctgcaggggagtttttatttcaaagctgttgttctactgcatttattcaagaacctaaacagggccctctactccccagcagagtgactgagacttgccagagactaatgaagaaaggcatcagagagctcggggacaaaaaaaaaagttcactcaaccagaagaattaagttggaggaatgcccccaagaaagtggaaaataacaaaacctcaagctattcagaaaaacccacagcagggcaagaaccagagggctccaaagaggcaggaagaggagagtaattgggtaagcggttgaattatcttaatggcaccaaggatccaactagaaaactcacacttcagacccatggagggatgaacctgaaagggtaaatcttctggacatggggcctaactcatttcctttcctaaacctctatgtcatgagcgcccttgtaaatcaccacactgcaccttaataaccgggctacaaattcaaaaggttgcaaatctgtattttctttctccaaagacaccaaaatcaaatatacctgaaatggatgatagcggtgcaaatgtctatctcttgggttcttatttgtctctagttcttggatttttctaaagaaaataaacatggccctcaacttaccaggatgatagacaatagtacaagtgaccaaggaccatatgtaaaggttactatgatcacacctgattcacagaaggggaaactgaggccctgggtttcctgtcacagtcaggaacatgtctcacaactgacagccctgagaccaggatttaagccacactcagccagaggtcagcacagcttagctatcaaatacttccctcggtctcaggcagacagatgcacaagaaagcttttacatgcacaacaagtttaaaaagaaaaataaggtaactaacagtgaagtcaagtattttttttctcccacctttctcatttgtatatggggggggcagtatgtacaccctagagtttatagaggccagaggttgccatgacatcagcagtcttccccaatccttccccactggaatgtgcagattcagctggacattctcatatgcatggacaagaaccagggatcctgtcttcaggatgatgtcccctccagcctggacttatcagatatataccaccatgtacagcttacacaggggcactaagattctgacctccaatccttaaatctgcccagcaagcaagcactttatcaattgagccatctcactcgatcgctcctctttgcttcactcaaactggctgcatagctgaggaagaacttcaatgtctatcccaccccttccatctctacctcccaagtgtcggattccaggcttgtgccaccacacccagttttactgggtgctagggatcaaacctagggcttcatgcatgctaggttaacactttaccaattgagccacacactccagtctccacttctccaatttgacatttattatcaaaagtaatctcgaatttccttattcgtaaaacacgaatttggaaaataagcattgtattcagtaatatctgtttttccaccaagctcaccccaaataaggaaagaaaaactgtagagctgtgacctacctccctaccaacttaacagtaacatcttaattagagtgctatgatttaaaaaaaaaaaaaaaaactagttgtcttaagtatagctctgcaaaaaaatcctaatgatcactttacgtcatgtttgtgtacacacaattaatgatagtactgtagcatcagtaaggttaaaagttgttttaattctaaagtagaaggagctgtcagtatctttatcaccacccaaggggaacttgagcatttcaaaggaatttttccctaattgtattttgaaaagcactttaaaaaaaaaaaaaaaaactgcttacgcactgggaacccacagaccttgtcgaatccaaattttcataagctagtacaagtctagacacatcacagctgaaggaattccttaaggcttactctgcgatttcagctatccagctacttctcagtcactgcaggtggggggggggggaccagactcggtccagctcttggggccaaaaccaccccttccatcccctgagtaaactaaagatatgctatgcctaattggtatctgaatctttttgtttgtttgtttgttttgtaacacacacacacacacacacacacacacacacacacttagaccaagctgcctggaactcacaaagacccacctacctctgcaccaccatgcctagctggtatcagaatctggacgtaaagctgatggttagcgatttgatttatttcaagcagtatgcatgcccttgcctcctttctgtaccaggcgccaccacgtgtaagggggtggggcatactcttcctttatctacctaacggtggtgctacctccatgctggctccacaaagtccttgcctcacaccaaccctggtgagcatcagattcacttgctattggttacaaatgtatcgagacttgggaaatggctctctccgggattcaggactggaatcttatttcattactaccaatactgtcctggagctctgtctcactcctaaccagtggtgcccagagtgtgtgccccagaactccaccagcagcagtagctgcaacattatctaaggtggcagtttagtcaagctgtcacatagagttaatggagcaaggctggaataactagtaagccacttccaggtatgtccgtgagtctacttctgaaaacgacctacaggcagttggagaccttatagagaagacctctttcaacagtgtggacaggcatccaaatcacaacagaaatggagggttctttcctttaaggtgtacaccatctcataatcgttatttttccatggttgcctttcccagcatgcatatacatacaagcaaacatttctctgctaacacttatgtttgagtccctcttgggtcactcttgtgcccagcaggcttgcagtaagccagaatgggtcatggatttctgttgggcgccaaatattaaaaaataaaaggatcttgggataaagatatcctttattagaaaaacaccagccaaacgcaaaccagagcatgccaggggcagcaaggcaggaaggccagagagaaggggctcccatgtgccttgcaaccgcttaaaaccttataacgagtcatcctgacctcatcttgaccacaccctgacaggcatggtcaggcacacctgtagctagcttctggcaggcgtggcttacactgtcccctacagcaaatcatctcttagctcacatcttgcgctagttttacatcaactctgacacaaggtagtcatttggggaaaaggactctcaattgaaaaaacacctctgtgagattgcctgtaggcaagtctgtgggggcatattcttgattaatgattgacagaggagggcccagcccatggtggtgggagcacactgtgtaagcccctgggcaggtagttctgaatggtatgagaaagcaggctgggcaggcggtggcagcagtggcagtgttggtggttgtggtggtggtgcatgcctttaatcccagcactcgggaggcagtggcaggcggatctctgtgagttcgaggcctgcctggtctccagagcgagtgccaggataggctccaaagctgcacagagaaaccctgtctcagggaaaaaaaaaaaaaaaaaaaaaaaagatcctcaaactgccatgaaaaaaccagggcaaggcacagacctggtagagtggtcaaggatgtgactggaaattctttttttaattatattttggctaagttagaggcaggcaacattccaaatttctttgagtccattcagtgagtctttccctgactttttgtagcaacatcacaatgttttacattataactaaaagatgcaaacaccaggtacaagtcatttaaagacctttccaatttgtactgggttgctgggaggggcccactcctttaatctcaacactcaggaggcagaggcaagcagatctcttgaagtttgagaccatgtttcaaaaaaaataaagtaaaaaaaaaaaaaaaaaaaagcttaaatatacactgagttgatataagcatcatcgccaaatattcccctcaatgctaaataaagaggtgtggacagatcagctggtcattcacctgagatcagacccttggcatcctatgggtcattcttctttcttccctcttgtccattctcccatagcaatcacataatcccaatctgttccttgagcaggggagagccccctttctacctcatggcctttgcaaatgtcccacagttacaccacagagcacccattctaacctgtacacagctaattttatcaatccttaggtgtcaagtcacctctcaggaaaacttgcctgatctaagctaggttatggcctcccattataggctccttttatttcttgcccattagtagctttgtttagtgtttgtgtctctgcactggaagctgcaagccggttggcaccatgcctgttcttggctgtattgacatgaactcagggtctggtgcacaaaagagtgaattttcagcagccttctggacactgtcttcccaagccatggtggtcagctaatttcaaaagtggaaagtgaacacagattctcagacttacccagtgtcatagtaaaaccttgcaacaatcggtctggtttccagaagaatcaagaaaaaggttaagtatgagcctttgtcatttaaatgactggctgactttaggttaaagattctaggaggtgactcagcagtcttgaagaggatctgagttctgttcccagcacgcacactgtggctaacaacagcataaatccagttccagggaatctgacactctcaggacaccaggcatacacaaggtccacagacatacatgaaggcaaatactcatacacaaataagtaaattctaaaatcctttgaaccaaacttacaaaacacaataacctagtatatagaatctggtcctacatctcatcgcagaagttgctatgcctcccaaacgcacaatctcttctgggggcctggggggcaggatcacactatgtagccctggctagtctcgaagttgatatggataccaggctggccttagactccgggagattctcctgcctctgcttccccagtgcttggattgccgtgtatctttcacctttttcatacttagaaatttccctagggtgaaagagtagccacttggggttctcaccatcttggcttccctggggcacatgctcatggcaaccatggtaaccagacatccttcattatcctaatacaaggtttagctgagctctgcctccctccttgcctggatcttgacacattccaaaggagtcactcagggctttctcttatggccacatgtccctttaccgatcttcccttatactctccaggactcaactctcaagatgcaggatacttgggagactagactgggcatagactcctaaatctatgtcacccatgagacattacactgggagtctgggaaaaggaggaggtaaaataataaaactataggcaatgcagaggaagaatggggaaaaatagggtagaaaatgtcaggtagtgatggcacacacaggcaaatcatgacataggtgtctctcattcttaacccaccttccctgcttccctccagccaggagctgcctccccctgctgaggacagtccaggtcacaacccaggcttctggagaaagtggtatatttgttcctgctgcttcagctcaaagcttgacattgtttaagatctgcacttaggctcctttgctgcagcaagagaaaggagtggctagtgatgttattaaatgacaggttcagggtttttttttttgtagtaaacaccctaacagttttcatttaaaaaccatcttaaagatggaagtttctgcttagaattattaatttctacaaaagtactgaaaattacagctgtcgccgagaaaggttgtttgtcccaactggtgtgtgtgtgtgtgtgtgtgtgtgtgtgtgtgtgtacacgctcctgcccacatgtttcccaatacacacacttgcaactctgaatatcttgcatcccatttgatggtatcaagactgctaacattccacaggcacccacacatgaaagcaagtccttgatttcaacagcctcggagttacacgacaagaaaagactaaactccaccaagtaagttttccccagtggcacatctacttttgtatgtttccctagggacctttctgaccccacagctttgtgtgtgccaacccccagccccaattaggcatcattttaccctctggaggctgaggagatgaaagcagccccaggaagaactaggctggcttcctccacacaatagccagccacctgcacagggatttagtgccccacttcctagttccttagtcctggagtcactgctgcctgtagcccagagaacaagaaaaaagaacaaaagggccaggtggctgggatagagactcttcattgtcacacacccccagtgcagcctgcgggattgaggaaaccaggttgttcccacctcaaactgtgtgtttagacagctgttagagccagaatagggaaaagaaaatgagtcatttttaaagacttcccagacattcactcaaatgaccctttcacaggggttgcacatcagatagcctgcatatcagatatttatattacaactcataacagcagtgaaattacagttatgaagtagcaatgaaataattttatggttgggagtcaccaccacctgaggagctgtattaaggggtcagagtattaggaagattgagaaccactggtctagaggaaaggaaacttctcaccatgagacaaagcctgtcttgaaatactgtagactttcctccactgatttagtttaattctgtcatgaaaagagctgggctggggcgatggctcagcagtagactgctcttccagaggacctgggttcagttcccagcacccatgtggcagctcacaactgtctgtaacttcagttccaggggatccaatgtccatggcaaaacaccaattaaaaaaaaaataaaaataaacaaatacaacaagaggcaacgaacatctgcaactccagcactcaggaggctgaggcaggaggattgataatgctgaagactgccctacactagatatagaaagtccaaacttaaaaaaaaaaataggcaaactgaagaaattttaaataaactaagtcatccatgagcatgaggctccatcacttgctgctaaacactctgctcaaagtctgtgatgctgggaggctggggtaggggtgggtgggtggcttagattggtagctggcaagcattcgtgtccagtccatgaagttctgatcagggttctgatcagctattcactagtctctaaaacacttcataacaagagaccagaaagaaatattaaagtaggacaaagggagaaatgaaaccagagaccatttaacttgaagattcacatataccccctctattttccactggaagtaataacaaagaaaggaagacatttcctttgatgtttggtggaattaaaaggatatgaacttcatattatcacttctataatttgatgtgaaacagccagattataaaactcccgtcacttacttctccctcatattgtatctttatcacataaagataatatgattaatacaaaacttttcaaaatcctgatcagaaaaagttcaacagcaccgacaagttggtttcattccaaagatgcctgaagatgcatttaaaaaagaaaaaaaggtaatacagtccataaatagactcagttacagaaatcacagttgtcagcacacaggcagaaaaggcctttgacaaaatccaaacaccttcatgagaaaagtcctgaaaaaacttggactagaaggaacataacctaaatacaataaatctggggtgaacagcctgtcttcttcacattgtcccaaggaaagaaatgtgacaactaccagcttactgaactttagcactctgagatttctagatacctacagaaagaattctaagtcagcatatcatagagatacttacacactcacaggcatttatatacacttatgtgaatatacatttgcatgaaaatacaaatgtagctgggtgtggtggcacaggcctttaattctatcactcaggaggaaaagacaggcggatctctgtgagcacaaggtcatcctgggtgttggtggcccaggcctttaatcccagcactcgggaggcagaggcaggcagatctctgtgagttcaaggccagcctggtctccagagcgagtgccaggataggctgcaaagctacacagagaaaccctgtctcgaaaaaacaaaaacaaaaacaaaataagtaaatgaaaccaaaataaacaaatgaaaagaaaatacaaatgcacatacaccacagaagtaaaaacgactctattttgggagcaaaaagggagaaagaggggtccagaaaggggtactatgaggagagatatcataaaagtacatgatacatacccaagaaaatatcataatgaaatccattattttgtacaataaatatacactagtgaatgtaattactttaattactagagaagttcgccactattatttttattttttattttttgtattggagacagggtttctctgtgtagcatgtgctgtcctgcaactagctctgtaaaccagtctggcctggaactcacagagacctgcctgcctctgcctcccaagcactgagattaaaggtgtgcaccaccactgcccagacactattaactttttatcacatctgtccttatttttcctatgcaaccgtgtacatgtaaatacatgacttgattagtggattttctctccagtgtggggaactgtaccaccaccttatgcatgtaaggcaaaacagaaccactgaattctattccagcacttggtgtatttccattttgaggcagtgaaaggttcaggcattatgctggcctgcccctgttacctggtggaatccactcaggcagaaccctggtcaacccaggactccatgggaactaagtctgcacgcaggtgcaaaggacccctttaaaagacagacccctgcccatttacgctctctctactcctctctctactcttctgtctgcttctgcttctgcttctctctctctctctctatggtgacggccatggtggtcagccattagccccgtttctattctctcttagtctctctactctgccgggcctataataaactggttaacatgtctgatatgtctcatcttttgcctcatcttttcttttatttctagtttaaacaaaaatctaacaagcagtgtcttactaagttgtccaggcaggccttgaactgacaatcctcctgcatcagtctcccaagtagtgaggcctatgcagcaggctcggctcccctgttggattttgtcacataactcacaaatactagtttgtaaataagtattgactcatttgtattctctcctcatacattcttggcaagtatccctgtgctttactgttaaaaatagacctggaaaccacacggggacatctataccagccactgagggctaaaaaggcaggtcagtatcaagttcacctgtatcaaattagacagagagggattctcacgttaagtagccatccttaggaacgtcctcctaaggttaataacaaaacagaaacccaggcagggctggaatcctttccctagacaatcttctacttgctacctgaagtgagaaaaacccttattggccactttcaccagctattcataaaacagctggcaatgactactgacatttgtatccatgacattataattataaaaggtttttttttaatacatgtaagaagctttagtgacgttacaaagcatgataaatagtcctcttaaaagcagaaaaaaacatattctagcacagatccacatttcacattatggaaacgagggagggggtggagatagacatttatctatctatagtcctgactaaatgagcacacacacaagctgatgtgggtgctttttgtttgtttaaactcaccgataacccagtatatatactttggctaaatgtacgtacaagtcacatccatctaattagtaagtctgacctcgaatagctgtcatatctgtcatgcaggcgcataccatccactttagtttttaagaacacaccacattgtcccttactatgtttcatttgctgtgtgtacactagatctcttgataattttatttctcctaactgcaattagctccctgccaaaattttaagctggtcagtcatcactggaaatatgactctgcatcaatgtcctgccccaaacctgccctccaccatgtttcccttccaccaaatgagctgattcactacgaataggtgaacgttacatgaagtgtcatggagttacagaccaaggctaccattgtttattggtgtttaccactcgggaagagaagactggcatcagccctacttttaagctataccgaaaacaatttaatagacaaagacctaaaatgcatatctacagacagcaattagaaagaacagactgacatccaatgcctaattcacagccaatatggccagtagttcattttaatcagctttctagcaccgggtttaaattaaacactctgttctccaccacacattctctctggcttgtatactctgccaaatggcaacatttgaacttatttactttctttcaagggctttaggcttatacattgttgcactaaaaaaccctcctcaacgtagaatcagcactcagcacactcacccacgactttccaaatcggttctgtaaatccaactccttccccattgactgtgggtcgcaatgtatttgcttgaccattggaaccaagacactgctagcctcaggatggaggggctcacaaaatttaaccagcaatcgtttgtatcaaatggaacagaatcatcaaatgagcagccagggtgtttggactgctatttgagaaggctgaaaaaggataccaggatagagtcgctaattaattcttctctgccccatcagccccaaatgtttcaaacagcaacagagctgggaaacacagttttaatgttgttgagataatgacttgatttgctcccaaaatgccggaaagctgctggtgagaccattcttaccctgttctcagagccagaagcaaggctgcttggaagtccgagaatacttctgttgctttccaagactggcagtcgaggggagctgactagcagtgaaggggccacacactaaggccttgtcaacctctcagtgaattatgggctgctcttgactagccaaagcagtgcttctgggttgccaaaatagaagttgctgacccatgttattaaaatgcaaatgtctgacaaagtgcctggaaagaggaatgcagacacacagattatctcccattttgtacatgtgggtgtggaaggccacaggagaccgaacagtgaggagctcctacctgatgactaagagacacagaggttgggaacactaagacacaggaggggaggcatggacacaactggaaaaacttgggccactgttctcaggaatgcctccagacttgccttcctcactctcatctttttgtttgttttttgggacaggtttcactgcacagcactgactgtcctgcattctgcagaccaggctgaccttgaactcagagatctgcctgcctctgccttcctgtgctgagactaaaaggcatgcaccaccaccgccagctcacaaccaaatcttaaaaggtttgtccacacagcctctcttgaccttcgcacagatgccatttggggcaagataaagatctggtgtcacactttttgtgtgtactgttgggtgtttaagaggcacactttgcagattgagcaggtgtaccctactatggtggcatataaaagatgaagttccagtccactcaccaagctatgcacccagaaactgtgtccatccaaagggggacgttcccccatgatccacacaaggccagagaaagtactgtttgcacaatgctcaccatttggggccagccaggcagtcattccaattacttacatggttcttgttgccaaatccagcagaaatgactcagttccactgctccctcctggaaattcaccctctcagcttgctctgccctcccaaaaaggaggcgcagctgtcagcctgcgcctcctttttggactgttccttcagctttagcctcagctttctcttgttccaccactgtaaccaggtgatcacactacctcacaactgcaccgccacagagctcaattcctctcctttccaactagcagtcccctttaacacccccccccatttgttcataaaggagctcattgtccccccaccaatgtcccaggatttctcttactgagaggctgattgatctcccgagaaacctgagccagcactgaccttgtctcttccctttgcattccaccaactctagtctgtccacctttctctggtcaagccttagcctgggctggctttccactcagcaaggtatactcctggggctctgttctcagacctttctcacacacatactctggagacattttctccaatctgccacttcctgtcacatcacacaccaaaataaaactcatcaagatttctcgacaccctggagaaaaagtccaagatttttcttcccacagcatacctctataatctatacccacctccatctcatgcatacccaactctactctgcagtgtgaagtctcaaacttcattctctctggtctgaacagagcatgctctgcctccttaagagcatgtgcctctgcccacgcggttaactccacctttcccagcacgtttcatctctgactttctctctggagtgttcccactgtttaggtgtctatatggagttgagcctctcccatcagaacagtgactctgcctactggcctagttcccaagtacacaaactccatttcttttagctataacaaaacacagaactgccttcaagaaatacgccaaggcaggtgggtgcttgccacttagctagacaaccctgagtacagtccctgtacgtagaaggtgaaaactgactccatactcagcactgtgtgcatgcacacacacatacacaccattgcaggccaaaataaacagtatacaccatgatcaggaaaacttatgtctggtgtgcaaggatggttcaacacatatatgcaaatcattatctatggtatgccacattaacaaactcaaagattaaaatttcataatcatcttaatagacacagaaaaggcattttacaaaattttatgtgcctttatgactaaaaattttttctcaaaaagaaccctctcaagcaagtatgtatggaagaaatgtgcctcaatataatgagactgtgtattacaatctcaccaccagcaccagcgatcgaagccaaagcttttcctttaaatcatcagaaacaacaaaagtactgctcctgtcagttctagacagtttgtactggacctggcctgagcaataagacgtgaaaaagaaaattccatccaagtcacagaggaagttagattgcctctgtgtagacaatatgatcttaaatatcaaacaataattaaaattaaaatcccacctgaaatttgatgtgaagtttgttgtttagccatctccttgaagacaaacccatccatcttggagggaggctcaagacacaggttaaatactccatcttgtccagaagtgcttaaactcagaaaataaacaacccaaaggcttcaggaagtccctgaagctgaccagattcactaggcccctccttcctctgaaacacataagcaacaactgctgagagacactctcagacaaactgagttgcctaaaagaggctcagaccaacagtaccatccgctgagctgactgaaagaagctgagaccaactgaccgacatagaaaagacactatccaaccttttgagatgcctgcagtttgtgcagtgagctcccagtgacctgccaggcatgctagggtgggctttggtggtacaactgtctttgagataaatctgctcctgtgaataaccccaataaactcattggctcaccaacatgtcctgaggaatagtcgttttgcacactgtgaagatgtgtcactctgattggtttaacaaaaagctgaacagtcagcagggcattggtggtgcacgcctttaatcccagcactgggagacaaaggcaggcaaaggcagacggttcgaggccagcctggtctccagagcgagtgccaggataggctccaaagctacacagagaaaccctgtctcgaaaaaccaaaagaaaaaaaaagaaaaagaaaaagctgaacagccaatagctaggcaggatttccaggcacagagaatactgggaagaaaaagggcacagacacaatgagacatggaggaagcaggaaagcaggatggacagtgtgtagatgagataataaagccacgaggcagaaagtaaattaatagaaatgtgttaagttataggagttagttagaaacaagcctaagctatcggccaagctttcatgattaatagaaagactctgtgtcatgatttgggagctgatggacagggaaaggctcactacaaagctggactttggtggtgtccttaccttgatctgttattagttctctatctgggataagcgatgtttgttcttttttttttttaacatctatttattttcatttatgagtgctctgtctgcatatacatctgtatgccagaagagggaattatcgatggttgcaagccaccatgtggttgcttggaattgaactcaggacctctggaagagcagccaatactattaacctctgaagcatttctctagcaccagaggtttgttcttgtctctcaaggaataatgtcatacaagagtgtttcaggctgtaaaaacagcatgagatacactatgaactacccaaaacagagaataagaaaaatatctcatttacaataccatcagtaaagaataaaaaacttaggaatgccagacattcaatactagcactcaggaagcagaggcaggtagatctctgagttctgagtgtgaggccagactggtctacagagtgagttccatgacagccagggctacataaagaaatcctgtctcaataataataataataataataataataataataataataataaattagggacaaattaaagcaagaggacatctgtggacagaaaagctacaaaatatttattaaaaatactgaaaaggatagaaataaatagaaagatactatgtatgcatgggtcagaatatagttaaaatgacattatccaagcaatctacagataatctctatcaaaatgccagtgacgtagccaggcatagtggtgtgcacctttaatcccagcactagggaagggagatgcaggtggatctctgagtttgaggccagcctggttacaaagtgagttccagttttgagacagagacaccttgtctcaaaaaactttaaaaaaaaaagaaagaaagaaagaaagaaaaagaaaaaagccagtgacaattttcaaagaaacagaacaaataacaaaaataacaaaacccttaaagtttgcataaaagactccaaataaaacaatatagagaaaaaatggagatgatacttaaaaactgaacatttcccaaccaataatgtttataagtatcctttttacatatttactatgccagaggtcatacaaacatatcttagactcttctaataaccatttatgggactatgactgttttacaaactacaacagtgagggtccagtcacattagcaatggggttcaaacacaaatttgactcctaacctcatattctaagccagttttcaatcaacatgctgggcctgggtaccagtctataaacctagtaacttgggagagtaagacaatggatcacagatgtacagtttgtctgggtaactaagtgaagtcctagaagttcaaatgttaaaaagagcttgtgcgtgcgtgcgtgcgtgcgtgcgtgtgtgtgtagatgacattcagtaggagagtacttgcctatcgtgtaagaggtcctaagaataacggctagcaagagaggggggaagggtcaggaggggagggagggagaatgaatatgaacccgtagctttcgtcaaatctaggaaatgccaaggaaccgtgggctctgtaattaagtctggagtgttacaacttgaactagctgctgtcaactcgagataaaaatagctctggcctgaggctctcaaacttctgaggtacttgagattgctctgtccatcatggagtaaccttttgggaagagctctaaattcccttctctttccagggagagccaagaacaagcccaggatgtgtaagactttgttattaaagttttaaaatatacaatatggcttttaggtccttactgcaagtatcctaggaaaggagcatttacatttgcatgcctctgttccgtggcacacttgatagcagcctctgtcacaaataccctaagttgctgctattgtcagctgttttttcgggtaaggagcatcccaggctatctttcccccagctgattctgccacagctgccgtttgctcctcattgctgccttgagtaactcagatccaaggcaaaaagatgaagacctcgagcaggcacaggcaacaacaaagaagtatgatgggagcccagggcaagatgttccatttattgggaaaccaagccatcacaaatctctatcaccaaagaaactcaagaagtagtaggattaagaaatcagccagggtgtggtggtgcatgtctttgtcccagcactcaagaggcagaggcaggaaggagctctgtgagtttgaggcctgcctgatctacacagtaagttccaggctatccgggattacaatagtaagagacagtgcggagatttcaatgagaatggcctctagagacttatatatttgaatgcctgaacctcacttggtgcaagtgtttgggaaagatcagggagtatggcatgattggaagaggtccaaaggcccacaccatctccagttaggtccctgcctccaaagtctaagtaagctcttggctactgctccagcaccatgcttccctgccaactgccacactccccaccatggtagtcagactcttaagtctctgaaagtgtaaggccccaatgcactctgtctataaattgccttggtcagagtatctcagcacagcaatagagaaataattaagataccctgtctcacagcggaaggaggaagggaggagggagggagggagggagggaggagggagggagggaggaaaaagaaaaatacccaataagtgaaaatcagaaaaccatcagccctcagtctaggtttctcaacttcaggccttgttgatattctgagttatgtaattctcagttgtggggctgtcacaggcatcatgggagatgtgtgagaggctcaccctatgttctgtagatgccagtggcgcctcccaagtcacagtgaccagaaatgtttctgcatggcgtaatatccctggagaattctcactcccatccccaacctgctgagagtcgctgctctgagaaaggcaggcgctgcagccacctagcatgtgtgtctcaggttatttactgcagggcttcatcttacatagtcggtttgagttttcggagttcttttccaacatactgagaaacacatcactcaaatgcagactaaacaatcttaaaaacacaaaaacaaagagactcaaaattccttgcttatcagggacctgagagatggcgtttacactctcctaaaccagtagtttactgaaaaattaatttaacccacccacgctttgatcttcctgcacgttatttcctcagacgagacctagcttgtgaggacctgacaggcgagccagctgtcagatggaagctggcatcaaattccaggtgtcttgagagggggcttctgtcccccacaaaggaaccttgctcagtaacatgccaaatgccacagaggggtccaattttccaacaaagcacacaggatgaaacaacaatgcagcttagcttcgccttcaaaggggaaggagcccttcggaggcccctcagtttcctaatgcagcatcttgtgtcagtcatgaatggtgtcttctggacagtaggtttctttcttcaattcacaacaaggacgacagtcacagctccaatggtccctctgcttccctttctcattccagtcactaagacgagggcgagaggggaggggatgggggctcctactcttccgttcatcaaatacagaaattcctaaaaatccagaagaaatgccaacaaaatctgaaatataaatggggctcacatcttgaaaattgggaggaagggagagtcatgagccaggaaatgcatgctgcctccataagccaggaccagaaggggatctgtgagggttagaatgagaatggcccccacagattcatatagctaaatgtttggtggaaccgtttgggaagaattaggaggtatggcaagttggaggatgtgtatcactgaagtggtcttcacaatttcaaaagcccatgccatttccagttgtgtctctacctcctggttgtgtctctccagatgcaaggtctcagctactgctccagcacctgcctgctgccatgctccccaccaagacgagcatggacttcaaccctctgggactgtaaacccctctaatcaactctttctcttacaaattgccttagtcacgatgtcttagcacaatgatagaaaagtgactaagacaggttctcttctagagccttcagggtgagccagccttgccagcctgtgggttttactctagagcagtggttctctcctgacgccgagaccccttaatgtagttcctcacgttgtggtgactccccaaccataaaattattttcattgctatttcataactgtaatttggatactgttattaattttaatgtgaatatctgttttcctatggccttaggtgacccctgtgaaagggtcattggaccccagaaggggttgccgatcacagagtgagaaccactgctctagagagatcaatgtggaaggaacttctggcccctctactgtaatagaagaatttgtgttttcagcattagatttataccttctactacagcagagatgggaaagtaatgcagactaggggacctggcattggtgatgctaaaacaccatgggaacagctttggaattgtggctctgtgtggagcctgcaagaactgaggggaacatggtagaaaatttacagaatggcttgaaaggacctgttaatagaaaccctgtgttaacagctgagggctcagagggaaacatggtaaacaaattgcagataacagaaaataacacaaataccagctcatttgcagcctatgtgcattggggaggtgaaacccccaagctagtcctcatggtggcttcccatctctctcactcaaactgcagaaagtgctttgccttagaacattttgttgttggtggtggtggtggtggttggtttttagagacaggatttctctatgtaacagccctggctgtggcctcaaactcacagagatcaacctgcctctgcctcccaagttctgggattaaaggtgtcgatcaccactccaggctccttccttaaaatatttttatatcctagtcatcagaccagtagcctctctgcaacctacttcaaggctcactcagcaatccagcaatcagggtcacacatggaaaaactcaagtaacagggcttagcagatcaaacactagaacagttagttatctgagttactttctacttggggaagaaaatgactgacaggtctgtcttcctttctccctcaggaaagccgtgatacaacttctctgaggaaagatgtggagacctggcatggagaagggaatcaggcaaatgcaccttattccgaaagccagtgctaaacaaaggcaaggcctggggactcaatggggctattccaaaattcaggggacagagataccaaagtctggggaagctgcctaaggctgcaggaagcaaatggggaggctaagttgtttctcggagtgactgtgactggaaacctgccaagtgcaatcagggggcactaggcagaggcactgtgccactcttggtgccaagttggacaggaagtgaagtgccaggtcccacggttgctcagccagcaggggtgatggggtggcctcagagaaagacatcactctcaattctgtaagcctggcttcctacctcagcctccatacttccatctgtgtaattataacataaaactcaagctaaaaatacaaccattcaacactccatgggcaaggcaaagcagattctacagaaacatatagaatgttctttgtaagaatgacagttttcctttcctaatgtaattaaggttttttttttttttttttttttttttttttttttttggtttttgttttgtttttgtttttggtttttcgagacagggtttctctgtgtagctttggagcctatcctggcactcactctggagaccaggctggcctcgaactcacagagatcctcctgcctctgcctccagagtactgggattagaggtgtgcaccaccaacgcccaggcgtaattaagttttaatttttatgcttttcataaaatttccgggaagaaggcatcactagaagaaaacgactcaaagtgtgaagctttttagcctgtttgcatccataccttcaatgacagcaatagctcattccccaggattatgtcatccaggagactactgtataaccaatggggaaatcaccctaggaactcttcccataaagccaagcacggagtcagtgagatggctcagctggtaaaggcacctatgacctcagcccaaactctgggacctacatggtgagaggaagaggactgtctcccgaatgccatcctctgacatccacaagtgcacagcagagcatgcgtgtgtggacacccacacacaaaggaatacacaaaacgtcatatctgtgaaacagctaagtagagaatgataaaaatcgggcacggtagtctgcagtctactctacagccagccttgcctcttccattcattctttctagatctagttcctgctgagaagacctcccaccttctaacttcctgctcacagctcccaatggctctcagccacgactctgggacacagacttttgtggtcatggcacatgtatgcactgagcacaatatggctttcctaacagaaaaggcttcagaagttctcccaacagccacattgttgaggccacagaagatgcaaggacctgcatttctgcattacattttctgaatttccccaagtcaggctggtataagggctcattcttcacactcccacggtatgttatggctcaatgccctttccaagtggagcaagatgggcagcaaaactccagtgcaagagtcaggggaagtggctctgacccctgcccactgccgtccctgacccccagggacaatttctgcaaatttctactaggacctgtccagaagagacaagggggaaaggtgctaagtggcattccccttatctcacccaccctgtggaatctaggcgtggcagctggtaagcttccagatcctcccaaactgaactgattttgttttgcttttcataaacatgagaaaggggcggcttgactcacaattatataatgaacctagctacggaaagcaaattccaatccagggctcagaggaaagcagtaacatgtagaaacagttcaaaagccctgacttttcatgacgctcttatttatcctgcccactccagttggggactctggagtccttcacttcttatcagtcagggccatgagacgggaagacaagatttatatacaaatgcacacatacacacacattctctctctctctctctctctctctctctctctctctctctctcacacacacacacacacacactctctctctctctctctctctctctctctctctctcttctctatcatacgtacatatgtaatcatagacgtatagtatgcatttaaaatataattttccacttcattgttcctgtccagggacatgtggcctcatatagaagtctttagactgtgctaaggccttcagtgtgctaagcatatattatctggcctttcaaagagtggcactttctatgtccactcttcagataaggaaacttaagtttaaacaagttagcctgaagtcacgagctaacagctctaaagcctgggccaaactcatgtgcctagcccaggattaactcctatgacacactcttaacagatgtgaaattcagctatgactcctccaaactgccctcagggctcaacaaattttactggcaaaataaatgattatcacaacctcttttattttttttttctagcaacctttgttcccacataagaaaccttcacacaaccaggcctgcttctgactggcaataagtcacagtatctccatggtgctgacttcaaagcaatgcaaatattcagaaggcctccctcttcaaagagggccatccctgcaggacaaaaattcagttccagaactgttccgaccagcaaggacctggtgccaaatgccctattatcttctacaagccaccctgcctgcgaccacagtcacctccctgctccttcctgcagctgtgtacacatgctttatcataagtcagaggccaatttagctccatagccaagaaatatgaaagacaagttcactgcgatgctactgtacaaaaagctttgatctacactccagaaacctggaagtgtgatgctgtgtaatacaagtttcatcccatttcaagatgctgcagaaaaaaaaaaaaaaaaacaaggtctggcttcagtagaggtggtccaagtccagtagactggtgaggacttttacacggagggttaaaatgcctgggtattaattctgtatctaaagaaaacaaccccagggaagcagaatagctgtcgccagggcttatggacagagggcaaggtgagatgagagtttagtcagacacagcttctgctcaggaaaatgaagaggcgatggacagggatgctgatgctggtcatgcaatatcatgactgtgccaaacactgtggtaccacagttaaaacacttaaaagcagaggtaggagcatagctcagtggacagtgtctagcatgtgtgagtcctggattctatccccagtaccacaggaaggaaggcgggaagaagagaaggaaggaagggagggagggagggagggagagagagaataaaggaaggaaattgattaaaatagaaaaaaatgactccgtctcaatatgtaaggtagagagtgctcacaatgctaacctctggcctccaaacacagaagcatacatacattcatatacaacaaagctatacatgtgcttgcataccacacacatccatgaaaaaaaaagcaaatgctattgagccactaaacaaaaacacacacacagacccacatacagtaaatgtacctatatacatgtttgcataccacgcacatacaaggaaaaaggaaaaagaagctattgagcctaaactaaacacaccatacacgtacgcatagatgccaagcttggcagaatccatcacctgtattataaacatctccataattgctccatatttgtgttcatatttaactaccagtgttttgtttattcttttgcttttgttttgttgagatagaaggttaccatgtagccctgggatgacctcagacttgggaccctcctgccccagcttcccaaatcctgggattacagacctgaatcacaatgcccagctcaattagtctttgaaattaattatgacccagagagaagctttaaaataccttacacagcacatcagatatactgtctggtcatcaggtacacacccccaacaacacgctttcccctagtgtcataacacacagcaggccaccctcacacgtgtggcagtgactctacattttatgggcagcttcaagacaccaaaggacaaaatgattcagaatgaatcggtctttggctcatggcagtctcttttccatctcatatgaacagaagctaaagctgagactgccatttcccaggtcacctgagttcatatcaaatgacagagctgccccaactcatccctccgccatccaaaggttttgctttgcaactagtttttttactcactcctctaaagcggaatgttgatatgtaagccaaccttgatctcaaaggtgaataattagtatgtcttacctgtgctataataaataccctgacagagaaggaaggaagggtgggagggtgacagagaagggaaggaaaggaaggaaggaaggaaggaaggaaggaaggaaggaaggaaaaaaggaaggaaggaaggctggcaggcaaacttccggttaaaaccctgacctctgtcagcccaggacatcagacttttcaagttacataaactccgaatggtttcctttaagtgatgtgaaattcagttttaaacaccattatgaaactgaaggttaaaatcaacagtcaaaaacataaaaataaactccaccctccctaattcttttattatttttttactatccttaacaaatttggaacactgctatgattcaaacaggaacatctaagcaaaccaatagtgcctcttggcatttaatgaggatgacaccaccagacaaggtgagagatcaattactaaatagttgggggaaacagttaactctttggaagggggaaaaaagtaaataggatcatacttacctaaaccaattcaaaatggagcaatgattttactataggagctaaaactggggctggaggtagagctgagcaggcaagcacttatttccttcctacaaggccctggctccatccccaccaccaaaaaaaccaaaatcacagcaacaaacaaacaaacacctccacacacacacacacacaaaccatagacatagctgagaaaaccctccctggacaatagtaaaacagccaggcatggggcgtcacacctttaatccctgcacctgtggggcaagggcagcagggttctgagagtttaaggttaacctggtctacacagcaagttctagcatattgagatcctgttttttaaaaagtttaaagaaaaaaaaaggattgtttttctttttatgacactcaatctactaaaactaagcaactgataaattccatgagaaaataccatgtaagctaagaccatagactgggagtgagttcttattttcacagataagaatgacttgttttcacagataagggatttgcttccagtgcacacaaagtgacaaagtcaaagtgacacgatggctcaatagtgaaggactaacagttcagagacaggtaaacacaaatggcaattctgggcccatggaaagacatttaaactctgaaacgaagcacaaactaaaaccacttgagatacctttttcatacaaaaaatggaaacttccagagaaatggtggcttctgcacttccctggcaggggccagcccagcctgatcaaaaagtagtggagcaacctctagaagtacaaatgcatgggttctatcacctggcaacaccgaatgcatcatgagctcaacaatatacactcaaggctgtgtccttcagcatcctgggataagaagattcatggaaaacagattaaacaggatgaggggtgtccattaaaaaaaaaaaaatactgtgctgctgtaatctaagtggtcacatgagcagggtctctgaggatggattggagggcctcatcactacacttagaacttttagctatgagccatgcatttgtcatttaagaatcattttttaattcatcacaacaaataaagctaaggtaagtcacaaaacaaaaacaaaataaaagagaacagatggagctggtcggtggtgaaacatacctttaatcccagcacccgggaggcagaggcaagtggatctctgtgagttcaaggccagcttggtctacaagggctggttttggaacagcctccaaagccacagagaaaccctgtctcaaaaaaccaaataataataataataataaaataaagaacagatggatttttaaagtcaagacaaagattaggagaaggaaatggtaaaaggcacagaggatcgctctttaatgactaatatttgaaaatgggaatctgataaagagagttgggggggggatggtactgtgagacagaataagtgttccagagactaaaatagtttttgtgtccagatttaaaaggctactgtattcccaggaaaatgaataaaaaaggtcattcataattcttgggacaaagacttttaaaatgttcaccaagagaatgaaaagaaaacctctctttatccccgcccataacaagatagtccttgagggtgtacatcttcacagttctgaggggaaacagcgcatgtgtgtggtgtgtacacatgaggatggtgtgtaggccagtgtgagcatgcgtgtggtgtgttcacatgaggatggcatggaagccagtatgagcacctgtggctgcagagcaggatgcaggtaaccctccctctacagctcttcacctttccaatcttgagacagggtctcaccatttagctagaacaccatagaacaaccaactctcaggactcctcatgtctccatcccccaaagctgggattaaggcacatttaaccatatctggtttttatgtaggctctaagatttgaacccaggtcctcctgcttgcacaggagttagtgctcttactcactgagccattcttcaaccaccctgaaaagttataagctatatcttcatcttcttccacagaataacttcaataaacagtatcccaagttctctttgttttgttttgtttttaattaagaaatgacagcccaggactggtgagatggctcagccgttaaaggctagctaggctcacaaccaaaatataagaaatgacagcccagaacactttctcaaaaaactaccatttagggactgaggagatagttcagtcaattaagtgccacacaagcatgaataccttggcttgaatccctagtgtccacattaaaaagctagatgtggtggtacaattgaaaccccagcactggagaggcggaaaaacaagaggagccctggagcttgtgggacaactagtttgtcaaattagtgagagactatctcaaaaaataatgtagactggggatgaagagatggctcagtggttaaaagctcttgttgttcttgcagaggacctgggttcaattcccaacacccacaagatgactcacaaacaaccatgactcccaatccagggtatctgacaccctcttctgacctccaaggtcaccaagcataaagatggtgtgcaccaatgcatgcaaaacactcatattaaaagcactcaaggaaggcacccaatgctaacctctggcctacacacacacacacacacacacacacacacacacacacacacacacacacatacacactcagatgccacacaaacatacatgaaaaaaacccaaacaaaaacctaatatcttcatgagtctaaaccagcaaagtaacagcatattctgtggtttaatgacaagagaagaaagaaaagagatttgaaaggagttcctcaaaggggaaggaattgggggtgacaaaggtggaacagacagtttttacttaaagtctttgtagaacttatctttttcaagtacataaacatgagccagagaggtagaccagctggtagaatgcttgcttttcacacccccagcgtaggtggtgcacctatttaatcccagcactcgggaggcagaggcaggcggatctctgtgagttcaaggctccaaaacaatacagagaaaccctttctcaaaaaaactcaaacaaaaacaaacaaacaaacaaaaaacttttcacagatctaatattccagtttgggaattttgttgttagtgatttacaacaaatgagaaccaaggaatagctttatctgtactgccccaataataatagctgacttgcaagtagcactaagaatagccagccgtttctgggccactgcttctggcgctgcctaccaactgcctaccagctcctacttgtgggtcagcacacagccatcaccttgcagtcttgttcactgggagaagatttggagacaatgccaggagagtcacactccttgaagagttcagcatttctcaggctttctcgtcaccaccataatttttttttatcaattctgaaatgactaaaatcacaaaataaaccagaatcctcagtactttgtttttgccaaacctcattcttgaaaggtggaattggggacaggtgtgggtttgcatgcagaacttaattaaaagcatcttaaacagaaaacataattcataagaatctaatggctatagttgaacataattatttttaaagtactagtccttggagtaaaatctaatatggtaaaatactaggtaggagtacaaggtgtacactttgcttaagagttgacttgaaatccccagttccagttctaaaagaaatgtagtcaccagggctgcagggacactgactcaattcctatggtcccctgccagtcagtcagagtgcctaaaattagccacctacttaagtagaaagaagtacagtgcacccattagagtcatcagctccaatacaggcaactcaggaacgtgaaatactaccagttttttgtgtgcacccatgcatcaaaacttgcaaggattccccaaattcaaaggggacttcaagagaaaagcaaattccaggaggatgtttactctacagctttgggcacccacactaccatgtgtgaaaagcctgttaggatttcttctgtgcccaggatgtacacagcacacagaaagtaaccctttcaagttttagctaacaactgcttttacagaactgtggcaagaaatacttcaaaagatattctgtctgaaattaagggctttgggtttaagaagcaagagctgtgaagcaacggaccaaagaaggagacaatagcagtttaccaggatgttgatgcctatctgagcttaattcaacccagcatccctaatgccgtttcggaatactggccgaaaagggctgggacttgagagaaagataaaagaaaaccagctgagctggggcatgcacagctctctatatacctatgctcccctttggtaattagatttgaattcttatacaccatagctttcctaaagtcatctaatggttctaccaacaaatgactgagcagtaaggagttagaaagatggctgagcagttagcgctcatggctcatgtactcatgtactcatagcgctcacacacttggctcacacacagggttcaggtcccagcacccacagcagacttctaaaatgaaagcccctagcaaagaccgtttcagcaatggttttccttcttttcttcgttttttttttttcttcataataataaagttaactctgagatctagccagatttggaggaggataaggaaaatagagatctgaaagagctctgtggtgagaccacaaagattgccagcaggtgggatggaggggcagcctcctgagctcaggcaggaacaggaagagcctgatggtgaagaggcacacaaacctaaagtaggagagtcagcatggttggcagtggtgatctctctggtcttgccatgcttggacacaaagctccacagcatccatgatatttgcaccacctttccttttcctaagctatacgcttgccctccaaccactcagccttggcagcaagatgaaaaccctgggaagcatttatgcttatgctgcagttgctgcagacaaactggcagccgtgggtgctttaggaggaagttctcatccacagatttctccttgtacatggacctgccacagtgtcattatggcgtgtgctgccacccccctgacatcctggagtaattctgtgaaatcagaacccttcaaaaccaaatcttctctctccagtgctctgaatgttttctgcagtccttggatctctgtctgcatacactactgacggagacacagcccaaggactggcatcagcagtgaccaaaaactgtggtggcctgaccatggcttgagtcaaataatcacaggggatacaaggcctgtgagcaattttatttttactttttaaagaaaactgtcagggcagatttattaggtcctaaaaaaatgccactttcaccaaaaggcactcccccacaaaggtgtgtgtttgtgtgtgtatgtgtgtttgacacaacatatgagcattcatgcatgtggaaaccagaatcaatggtaggtctcttcttcaatcactctccactttgtttttgttttggggggcacagggtctttactgaacatggcactcacacacttggctagacttgaaagccagcaagccccagagaccctcccatctccacctccccagcgctaggattacaatcacccgactgccacacctggcttttatgtgggtgctggggatcaaatttaggttctcaggctggaggagcaaggccttggcccatatgcacctcctgtcttacatgtctacccttctcttaagagcactatctacctctagctagtagttggtggcaggaccatatcaacctgggtaattaaacaagattacttgactcataagatgaaacgagaaaaatccagacatgaaagccaagagaataacaaatataattatagttggtttttctttgcatgtgggggaagggtgtgatgagtgaacagagggacttgtacatgttaagtcagctggccaccgagttacatttctagccctaagaaacacgattttttggttaaaatgcagagctgggctctaagtaacagtgaatggaaagtcaccaagcttcgggtacagctctccagcccatgaaatattaattagtcctgtccagagaatggaccttgttttcgaaatctaggcagatttctgaggcctaacctttcaaagtgaaactcagaatgcactttaatcaattctaaaaacactttcagcgttgccatagaggtcattaaacccttccaaattaaatatagttttctattatgggagattacattatttacaattatttgctggtcttcctgcaagaagatcattcccctcccattgttacatgacgtacaatattcccagatggaagaattaattatactcccacctcctcctgttggccagcttgtccgtgtggctggcttccacccactgtaagtaagtggaatggatccacaaaaaggcacaaagagtcatttccttccttatactctaccactagactatgtctcggagtgggtttggtagcctgttcagtctggacccaaagccaagaagtcccctgcaacagagctcttgctgtcatgtaatataaaagtggtttaagtcactgtctatggcaagtgatgaaaccacttcattcttgaaaccaatgataacaaccaggagaggaattatcatctagagaggtctgaaagagtgggcaggtgtacaggtttcactgttagagaacgctcagctaaccaatgacaaaacaaatagaaaataatgcctgcctttttccatttaaagtttttatcttctgcacactgctctggggaacaagaggacaagaactgagctactagtttgcctgacctttagaagacattaatgaaaacaatagtgaattcacagaagacaacgtccagccagtctttgcacaggtgtgtaattaatgtctaaccagtaggggataaaacaagaatcgaggttataaacttaactagcagacctggctcctggcaaaaccaggaaatgtaactgtctgccaatgtgatggaaagtagaaatctttctttggagggggggggtggtgggagtttcaaggcagtgtttctctgtggctttggaggctgtcttggaacaagctcttgtagaccaggctggtctagaactcacagagatccccctgcctctgcctcttgagtgctgggactaaaggcatgcgctagcactgcctggctagaaagtagaaatctttttaggtatctggttagtcttagtggctgcctggacagctgaccaagatttgaactctctctctctctctctctctctctctctctctctctctctctctcttttaaaacaacaattaaaaagaacttgataaatattacttgatttctgtcttagggtttctattgctacaatgaaataccatgaccaaaagcaacttggggaggaaagggtttatttgtattgaacttccacatcatagtccatcgttgaaagaagtcaggacaggaactcaaacagacaggaacctggaggcaggagctgatgcagaggccatggagggctgttgcttaagggcttgctcctcatggcttgctcaacctgctttcttatagaacccaggaccatcagcccagggatggccccacccataatgggctgggctctcccaacacatcagtcactaattaaaaaaatgtcctacatacatttgctcagttgagcctacctactctcagatgactatagcttgcatcaagttgacataaaactaaccagcaatcttacagatgttttttttccaaatgctagtttaaaccacaaagcttttcctttaacaaaatatctttaaaataaatccaaatgattttacttaaaaaaaaaaacctgatctgtacgtctttaaaatggaacagcacaataaaagaaactagcacttctataaatgtttatcttgataaagtcttacaagtgaaaatacctgtcaacacctagatcagagacagggcagaggaccatgactggaccatgactggacatttgctcagttcttccctgccccaggctgtcctgtcctggcttctgtcacctgggctggttctatctaactccgagctttgtataaacaaagtcacagaatatgtaactgtgtctgacttatttctcttattgcatctgtacaatttgtcttattctggatgactgccattcttcattttttgatgctcagtgatactccattgtagaactgtgccaccatgacctttgacccatttggatagtttctaaacagcactatttatagagtctcccaaatgcttttgatgactgtatatgttcatctagtatatgatacataccttcccatggaaagaagtgcggttgctaagtcagagggtgtgttcacagaatgccacagggtgtgtgcagcattaagtggtacttccaaacagctttctaaagtgggtaaactcactcacactttcatcagcaccatacaatagagcacatgtctacatctccgctgttactaaccaggatttgtcatgtgtaaatttcgaccagttgtccgcaacagtcttaataggcattttcctgatgactaaaaatgccttcttgttcagtttaaaatgttttctgttgttcttactctcctgcaactgtcttcacataatttacacaggtctatagatatacatgataagtggacaagtatcttctctgtgacccactctgcctctctgaacttgtactgatgaaagtttgtttgaatgcatgtgagaacagacaacactgcattctccaggggcccagaaagtaacctgggattcctcatgtaaacacttcacttgtctgaaatgaggaagctacctctgtctgccctccaggaacaaatgttacaaatcactgtcctcctctcctcaaacttcaggcccaaccacaggtaaggcggggagggggcaagagtttgtcacttgcaattaggcagattttctggaaacactgttgccaacaatgaatggcttacagacctgggaagcctcgctgaagcttctactcaacctgcagtcccctggagccctgccccccaaccccaatacccacagatctcagaaaagatgtgccaagcaccaatttggatattccaagaaaaagatctcatttttcctctacccagggcccaggaaccagtgccctcaacagttcctcagcaacgttcaacaatgctctctgtgagccagaggtccacaatgcactgcctccctgatcccctcaggtctgctgtgaggtgtaatcagagttggagcttttcttttgtcccaacctctcagtttcaaataagcacacaaaagctgatgttggttacagaatgcttggcctatagctcaggcttattactaactagctcttataacctaaattaatccatttctattcatttgtattttgccaggtagcttcgtggatttacctgtcttctagcatcttcttcctcaggcatctccgtggctctgcccttttttctccctgtatctccatttggctttcccacctagccttatgcctaggtataggccaattcagctttattattaaccaatgagaggaatacatattcattcccattttgcagacagaagaaaaccaaagcaggttaagagtactcagagatggagatggtgaaactcaataaaggtggccagccaggcccctggaaaccagcctccatttgtcatttcttgagagagttctacttccctggtccatgtgggctggcgagggtggtggcccctttctccgaagtaaacaaggcaacccttctgatttttctagacagtcttagtcaggagtagtctttccttcctgattgtccttcctatgcgctcccagcattcattccaaattcaccaaaatgtacttacacccttcagcataatgttttttgagcttcttgtcaaacacagaaaagtgaaggcgacaagtccagcaggaaagagtgagggtaagactctggggtcccaaggggcccaagccctgccatatacacaactagatcctctcaaccaagagctgggcaagagtaaggagaagcaggagaggaaatgctggtctagtaaactgagaggcaaggagaaagaaaggtcaggtttgatgccacaggcctcgtctgagctgcaatcagcaactcaacagtggttctgacaaggctccatcagaagggcactcacagccggctcagctatctggaggctcaccacacattctctttagaagtttacaagaaaatgactgctacactgtataaagtccacagccgctgaatttctgagcacttttgtttctaagtgtaggagtgggagcagctgtgaccattcttcccaccaaagcagctctgagacttgctatgtagaccaggctggctttgaactcacagagatctgcctccctcttcctcccaagtgttgggattaaaaaagcttgtgccaccaggtcatcaatttttcagtgtttgttgttgttgctattgtttttgttttctaactggtcactttgtaccttgagaggcaaactgctggcacagcttccctctctcaaggagacactgtgtcccaatgagactctttgttgttgttgttgttgtttttccagacaggatttctctgtggcttcggaggctgtcctggaactagctcttgtacaccaggctggtctcaactcacagagatctgcctgcttctatctcccgagtactgggactaaaggcgtgggccgccgccgccgccgccgccaccaccacctggcccaatgagactcctaaatcctccagcaggtaaaatgagcttgggagtggggccacaaagaccttcagttggcttttcctgtttcctgggcaacatcctcgagaattttgcgacaagaaacccaaaatgaatcgtgtctgtttctcttttccccaaaaaaactgaactgaaggagcatgacacatggttcccccgtgctctaaattcatgaaagaaaaggagtgaggggacaggagtgagagaacaaaaaaacaaaaaaatgtgttcagaagcacatttggtggctgggcgcgggcggggggtgtcaaacttccctgggacattttaaatcttaaagggcaatggctagctgatggactccacagccaagggacaggtaccactcggtgcctgctccaccacagtgatgactggtaaagcagaaccttcagggttttctgctactgataaaacatagctcagatgtgttttaacaaatatttcagaatgcctatcaaaggcagcctagcttctccctccctgcgcagccatgagtcaggggctctgccctacgcctcctatgtttgtatcatttccagcactgccaacaattctagagccatagccaccctctgctgcctcccaaaagacacgatctcacaggggaaccagcaaaaaacaatacaaagaaagtcccatctgcagtgggttacctaaatgtcttctgatgtcctcagaaagccttccagggctaatgtttccttcatccatgtctctccaacatcctctccttgataggagtttggcaaactactcccactccccagtttagctctgaaggaagttaaggggatgtctctagagacaaaaatctgatttggcatcccaggttgaagcccagagtccctctttcataagcccaggattcacactcaccaagcaacaaggacaatcctcacaagtatgtcataggcatttcagatcacaggcatccattccttgctcatactaatttccaagggccaagggaatacacaaactaattagcacccagttggatgttagttttttgtttgttttaacctttatttgatgtgtattgtatgaaggtatcagatcccctggaaccggagttacagacaattgtgagctatcatgtgggtgctgggagttgaaccagtgtcctctggaacagaagccagggctcataaccgctttttctagccccatgcatggtactcttaaagaaatgcaagtccttgaaaagaatcagctgaggctgggtggcaagcatggaatggagtgtcaggtggctctctaggagttccaggacaggcctggtttacagagtgagctccagggcagctagggctacacagaagaagaaacaaaacaaaaccaatggaaaagacaaaacaggaaccctatagttgaaggaaaaaatgcaaaacagcctccaggaaatgaatcaaagcacaccaagctctctaccccacaggttacattcctaaagcaacgtgctttttcccagtcagcatcaaaaactccatgcctgggattcatcaaggtatcacctgaccctgggttggcaagccccgccctccattagaatctccatatctccaatactctcctcctaaaccgagctcccccccccccacctccctttcttcctgacccattacacagcattactcagacactgtcccctgtaaaaatgtcacttcaggaagcaaaaatcaatgaactaacttaacacaatataaaagctgaaatagcatgagtatcgtctttcaaacctatctaacaacatactatcacactcttagaatttgctagctttatctaataaatttctattctttccattttgattagacataaatcccttgaaaaaatgaaaaaaggtgaattttgtagtatggaggagcagatataagtaactgatacaaatcgtccaggtggttggctggttgtttggttttgaggcagggtttcactggcccagaactcaagattccaccaaacactgggtgtccagtcaccattgccatgccccgctagctctagaagaactccaattaactttctatttcattatactaaaaagtgaaaagaatatgaaccttttggggttcttcattagtcatctggaaaattcagtagcatgcacttacacagttaaaatgaagccatgggcaattgtaaccattggcaaaaatataaaagtggggctactaccaatgcccggagtagacaccagcaaagtcactttggcaattcctaccccttttcaactccaggaccaaccactctattcctagacatatttcccaaatagatgcccatgtatgttcatcaccaataaaatggcacaaaagtgctttgcgacacggtcctaatttcctttctattgcagtgataaaacactggggtggaaagagtttgtttcctctcacactttcaggtaccagtccatcactgagggaagtcagagcaagaacctgaaggcaggaactgaagcagagaccacggttactgcctggctcactcctctggcttgctcatctacttttcttagacagcctgttagttaggctttaaacctggaacacatggctgagatgcctacttaatacatcaaagtgaacctggccaggctctcccagcatccctcagtccctacctgttacagagccctccaggctggcataacctcaccccctaccttaaacttctccagcccaggggctgagctgtccttctcctggctgcccttcccacatttaatctaaccattttggttacctgctccctttgtatctttgtacctcctggctgcctggttccttttcctcccttcttcctccgcctaccccctcatggcccagctcatggcccagtctggactctccagatgtcccggtccctgcctctggctatgttctcccacatatctacaataaacattctcctccgcctaggagtagtccttcccttttattttttcattcatttgttgccaaaacccaggtccaatcatttccctttcatttctttttttcttttcattcacaacccaggatcacctgcctaagaatgctgcttcccacagtgggctgggtccatcaattatcagtcaagaaaatactcacactgacacatccactggccaatctgaggaggcaactcctaactgagcttccctcttcccaagtgtatcaggtgagcagcaagaccactcagcacaatagtattatttatatcagcctcaaaggggtaaccaccctgtgccttccacagtaagatgataaagagtaggatattcaaacactaactggcaatggagacaacccataacccctacaacagtggagattaatcttaaggaacagaacactgagggagaaaaaccagggagggaaggtcacaccctgtgataccgtgtatataagactcaaaacccgaaaaattaatctggatatcagagataagagtagtgatgttggctgggtattggtggtgcacgcctttagtcccagcactctggaggcagaggcaggctgatctctgtgagttcaaggccagcctggtctacagagttccaggacagcctccaaaacaatttagagaaaccctgtctcaaaaaacaaaaacaaaaaaacaaaacaaaacaaaaagggtggtgatgttaaggggctacagagatctatggcttccttggggaaaggtagtttggtgacaaaggagaggcaatcccaacctgctgctacctttacagccaaggtactggggggggggggaggacaccagatatgacacagggacagaaagaatggagaagagggagtggggaggaaagcaaaggagagtaaacaaaaggcaggcatggggtgctgaggcaaggggatctccagttttgctgtcagtctgggctacccggggaggctctgtcacaaaatgggggaggggtggtgcagagaaagagagaaacaaagtgagatgggcagaaaaatctactgccaagagacccaaactgaaaagcaaatatcaacaaatacacgcttatattcttgtctcaaatcaagtcaacatttctactctaagaaacactgaaagtggtcttatctacacagtgtcagggctcggctaatacaaacagggattagtgcatctttagagattttagagtaagcttcactgcccaattccattaactaaatgattttttttttttaaagccaccttcttctgagctacagggctcctgacactgcactataattgttttcaatgaaccgattgcttctgtaatgaaattagcataaggatgctcactattaacaagcccttctgcatacacatccagagaaactagagctgtgcctgtcccaagagacttcatactgagggtggcatttgcttccagcaaccatcatttaaatgcaaagtgcaagactggagaaagcaaacaggtctaagcttaaaaacctaagggtgaaagaaaatccatcaggtgatgccactggctgttctcaggaccccatctgccctgggcaaagacaactgcatctccagtgcctagggaaatgggggaggctcccaggagcctcaaggtcagctctcccacacccaagccaaatccattttctcttttgtggtccctcccaagcacacaatgcacagtcagcacagtcaacaaacctggactccctacatcaccagagccttgtaaagaaagggtggaatgctttacctaaaaatacaaagacaaccagagaaactaaatctatatatatgcatatatatgcatgtgtgtgtgtgtgtgtgtgtgtgtgtgtgtgtattatatatataacaaaactgtaagagagaagggaatgggacaataatatcaattccactgcttcctggaaggggggtgggtggcaaatctgtgacatcaaatcgagaagaatcagagctttataaggggcaaatgttttgacactcttatccctcccttgaagtctccctgtcccttgaagtctgcatagttgtcagaagcagggtatattacctaacttttgagagtggtttataaaaggagtttccacctgcttcctgggggggggggtgtgcttgctgtagggctgttttcagtgtgaactcaaaggctgcttttggaggagagtgacatgtaaacctaattctaggaaaatcaagttatcatccatgatgggggcaggaattctccagtcagttcagtttcttcagttttcatttatatcatgcccagcctgccttgccatacgccagctcacactgcagattttatactagcagtctctagacttaaactcagtctcttcctccctctccctctccttcccccccctctctctctctctgtgtttgtctgtctgtctgtctgtctgtctgtctgtctctgtgtctctgtctctctctccctccctccctcccatggggagaatccaccctgcactcacaaagtccaactacatggggccaccatgctaagtcttcatggagacaaatgaaatcacctgtacgccctcccagcagtagtcaatactgagtccagcctcccctctgatactcaagaccccccagagaagctcggtccctagctgggtgctggacagtgtgacttcctcaacaggctctccctgccctgtccacattgctgacccacagaatctggaagactagcaaactattcttttttttttctctgtgtagctttgaagcctatcctggcactcgctctggagaccaggctggcctcgaactcacagagatctgcctgcctctgcctcctgagtgctgggattaaaggcgtgcgccaccaatgcccggcctagcaaactatttttaagccactgtttgtggtaaggtttttttgtttgtttgttctgttttttttttttttttaaataataaccacctaaaaatcagaaagagaccacagctgagctggaatcagagaagtgatgggttttagttttcaatttaaactttttggtgtctgccctaattgcactgtgaaaattagaaatcttaaaattcagaacttagaaatagctaaaaaggagcaccaccgtctctgctaggcattcttgttgctgagcaagtcccatggctgcctcaatcaacagagtaaggttagctcatataaccttcacaacaaactaggaagaccatatattatccctgtgtggctttgtttgttttgttttgtatttggagacaggtgtctctcccagactggccttgaacttacgattagtcccacagcctgagtctctggcatgacaggcctaggccacagactcagccgacttagccatttcacagaagggaaagtgaagcctagagcagttcagtagctcaccaaagaacacaaagcaagcaacacatcctacattccagccagaggatctgggatagaacaacagtatttatttacatgtgcaggaaggtttgacagtcacaaatctatggacaaaggcagcaacctcaaactgccataacttctacagccctgcttacctgagctcctgagttcccgactccagctacctgcccccaattcaatgactatctctgagaatgaaccactggggcctactgcaggtgggcataaccccttcctcctattctggctccatacttttgtgcctcctcacttgctaaatgttcagggtgcgtccagcaggaccctgcataccacagaaatataattattatttaccaaacttaaggggtatcactttgttcaccagcttctccactagggaaatttccactgaattccaacgggaaagaaaagaagttgcaagctccagctacaggaagcagccacacaaggaccctagtctctccattcctcacaaggagcccccacagtgctgatgtgcagctaagaagaagctctcttcctgtgaactcgctctcttcctatgaactcgagtgtggccctgcttttctgatggctctgatatttaccatcttcctgaagaacagcaaggtgtggctacctagagatgctcagtggtccctcacttcccctgagatcccttaaaggtcagcccgagactgacagctctcagagcccactcctgagcacccacagcaaacaccaaatagataaaaataaccccctgtctggggctggattttgtcagaataagattctacatattctttctggacaaacaaaacaaaccactttatagtagatccttcttttgtctcctaaagcccctggctcagagcctttgccacaaagtatctcacaaaggaaaactgaacgtgactgttcaatgaaattgcaatttagtctatttagaaggaagatagcagggtcaacctggtcattatcttcagaaaagcatttcaacccacaagagaccctctcgctgtgctctatcaccaacttagagatttctttactcaatcccatactaggttcagaggtccctcagctttttttacttttgtattttttttttgggggggggggtggttctgggcaatgtttctctgtggctttggaggctgtactggaactagctcttgtagaccaggctggtctggaactcagagagtgctgggattacactcacgcgccaccaccgcccattgaggttcctcagctttacagggagcaatacaaggattcagagaacacaaaggaaaagccccagctactaaacaccatgaatgggaggaaaaactatccacaaagatcacttctgcagcaatacataccattccaaagaaagaataaacattcccaacagtgggaattatatgtgattattgtcacatgaaagcacaccccagaatcactccagtgcctaagtgaacatggctgcacatcttcacaaccccagcacttggaagttcaagactgtcctctgctagacagggagtttgaggccagcctgggctacatgagatcccatgtcaattctctctctctctctctctgtctctctctcctctctctgtctctgtctctgtctgtctctgtctctctctctctccctctccctctctctctctacacacacacacacacacacacacacacacacacacacacacgtgtttcatgatattttaataacaatatttcaaaactattgttttgtagaaatactacaaaagtattagaattgtgacttcaaatggacaaatagaggacattgttgcaaatctcctatttaagtttaattgtggtttaaggccagtataaagtcaagcacacaggtgataaaagtataatctaaaacacaaagaacaaaacagagcactgctttggaaatctgacagtatcatctaatcgaaacactaggttagaacttgactcctattcccaacacgtatgtatacatgtatgcatgtatgcagactcaaagtcccaattgccacagatgaaaactagaaactgttacaatcctaaaatggataatataggacaatctcacaatggaatactacacagccgttaaaaggaactgcctccccaaacctttgtttttctccccatctagacctttcctctccctctcatccttccaggaagagaaccccttatgatctccagaactcacagagttaataacctagttttccatgtatcgatgcctgtaattttggcaacattttaaaagtacttttaggcgctaggagtggagcccagtggtagaatacttatttagcatggctgaggttctgagttggagccccaggactaaaaacaaacaacccttgcttttaaatgtgaagttgtttcccctttaatctctccttagtgccagtgcaagttctctgattcctgcaatccttccagtcccctctgttctggtcccctgccccacttttgttatagtaactcaatcaactacagcgaccagtggagcagggaaccctagggctcagaaagatcgccaaaggccccctggactccgagagctaaatgaattacacttcctagtgcaagggcagacacttctcagcgttcaccctttttaatctccccaagcaactgccacacttacccgcagccgcccggctcagcacctttcccaaaatttaacagggaaacaaccaaagtttgatcacgtgtcttctcagtcactacctatccccttacaaccggagaaaggccaaggagacagaaagagcgaacggcgcgggtggggggtggggtggggtaaggtttttgtgggaaagtgggagcaatgaaaatcttctgatttgtgttgatgatgacataactttatgactattttaaaagtctacgagtcatggattttaagaggtatattgatgatgtttattatatctcaacttttaaaattaagtttaagtgggttaaacgtggaaaggcccaacaacttattagagagcgatgcacgaaaggagaaaacaagattaacaactaagtaccgtataaaaatcaactcgaacaaactcaccattaactataaataagcaaggaggcttaagttcccatctagtccaggtgacgaccaaggtcactgatctgggagatcggcattcctgattagtctccggctctgggtctgattcgatacattaataagacgagccgactctcagaagtcaagtgcggaaagcaagcgctgggggacgccacagaacgttgtcaacgcaagcgacacggcctgcgcctggtcagcttagctgcgcgcagtcagctccagccggaccgcccgcgaaaagttgcctttgaaagttgcaaaggcaccgggtgaggggaccagattcaccagccccgcggccccggagcgcggggttccccacgtgcctgagcgaccaagcgtgcctcgggacgctgccacccgccctgctggacctggcaccgcaggccctcaggaacccacccctgtcccagagcttagggcggtccctgaaggccgcgccccacccctcccccacgcccagaccctgcaacaccagccagggccacctgccgctccagaaccaggataaaggaatcctaatcgccgctcccccccacccagacggtccaccgatcttaccccggagacgcctcggaaaagggcgctgcgccgcaccccggccccaaaaggccggagaggtacccaaaggccagggcgccccactccgggtcgtgaggcgccgccccctcgagagccagcggtgatcccaggcggctgctagccgaggcaaccccaccgacctccccagggcaatcccagggccagtgtcgccgtgcgcctcggcacgcaccaagactgcgaggctaggcaccgggttagctcgggacagggtcggagcccaggcgcctcagaccgtccctgcaggggacaggagcgcagcactgccactactcacctccagcgccgctggtctggagctggcgcagggcgggcggctggcggggcgggaccgggaagcgcggggcggagcctcgggcagcgccagaatcaaactcctgttgcaccatgagcgcggagccggatcctgcagcgccgcgcacgagttcaccgtggctgcccggagtcacggagcgcagggacgcacgggcaggggcagcccggctgcggctccgatcagaactcagcgcgctctttgtaccgaggagttcgccgtggagagcccagtgcgcctgcgcgccaccgcaactcttccaggcgcacctccgcacctctgatccctaccggccaacgcgaccatcccattcgcagggagtgaaccacatcctttcctgaaggatcctcggttcgtgcaagttatcgaccaggcgagctgggcgcgtcaggtgcagcttggtacctcaatagcgcctgtgtgcggtgccgttaagaagttggtttgggaacttggatggagtaggggactcgagctcgcaagtctaaaacaggacctctctggagtgactggaaacttccagccaaccaggacgccgcaggggcctaagtaatttccttccagcaccctgtcgagtgaagagtctgacgtagtagatgactcggcctggcttcagggtgtggagcccaagaaagaagtcagttgtcctaaaagctctacctggagtaagggcaatagatccacaagagatgagctgggggctgagtcctctttcaagaaggtggttagggacaggaaggccgagctatcagtgttaaaactgccaggatgacacaagtctggagccagaaggatgaggggttctaagtcatcctctgctacatagcaagttctaggcgagcctgggctacatgtaaaacaacaacaacactggtgtaaccaaaataaacataacgcccacgcctcactgtctgctaactgcttagagaagagcctgaggttgtgtggggaaatggcttgccctggagagaagctgcggaaccaaaacttccttgattcaccagcgtacactccctgcgaattcctccaagtgctgcccctcccccagaatgctcattttcttagcgctgctgtcggggtgacagagggccaatcaccgcctcctggggacgtcagtttctgcatgggttaattgggtccttggattcaggagatgctctccgcatgccgcctttcgctgttaaggatgatttcagtcaaatgtgttaaccagcagagaatcagcggcaccggaattgctatgttttcaaagtgtcctcagctggctagctagacaactcaatcagtgagctctaagttcagcaagatggcccccttggtaaataaggtgggaagtgctccacgaagacacctgacttcatgtctggtcttcatgttctggctggcctctgcatgcatacacaaatgtatgttcacttcacacactaatgtgcatacacaagacaccacacacatgcaaaaaaaaaaaaaaaatcaatgccctccacccccagcattccaagtcttgacctcctcttcatttctccctctttacattttatatttagtccatgagtattaaacatataggctttcaaacagtaggcaaatgtgatcaattaaaaaaaaaacatagcagacctatggtggtggtacaagcctttagccccagcacttgggagacagaggaaggtgcatctctgggagttcaagaccagcctggtctacaaacaggtcatcatccaatgctatatagtgagaccctgtctcaaaaacaaacaaaatagcagatcccaaatttcagatttatatttgacatttttattttatatttactcatttttaattaaaatcaattgacacatataatttatcctcactgtgcacagttggagtgtttgaatatactcacaaagttatagacagaccattgtcgctcatttcagagtaacttcatcaccctggtaagaaaccccagaaccatcagcagccgccccgtcacaccaccccgcccagcttctggcaaccaataaactttactttctgtctctagggtctgcctgtcttgtttcatatgaacaaacacaatagcaatatgtgggctttcaaagctgaggcatctttcactttgaaggtctatccaggctgtagtgtacatgagtacttgatcctgcaccccaggtcatctgcagtgagatggtagcagggaataaccataggtgaacatcagtcttttgaatgggatagtttaaagagtgaggcatttcttggaaatgcaacatgcaaaaaaagaaaaaaaaattgtcagacatgtcaacatatatagaagctcttgaatttatataaaacatactagcagtaatatgcagctcttccagaagaattctaattccatcaagcaattactctgtgcacacacaggtcttaagactgctgtgtaagaatgttgaagcacaccctagcgggatgtttaggaatagtttaagctgagctgtaagaacagagtctttgggtcagtaagtgagcactcatcctcagctataaaggaaacccatggggctggagaaatggctcagagactaagagcagtggctgctcttccagagatcctgaattcaattcccagcaaccacatggtggctcacaaccatctataatgagatctggtgccctcttctggcctgcaggcatacatgtaggcagaacactgtatacataacaaataaataaaatcgaagaagaaggaggaggaggaggaggaggtggaggaggaggaggaggaggaggaggaggaggaggaggaggaggaggaagaagaagaagaagaagaagaagaagaagaagaagctcatatccagcctctgaagatggaacagccttttctgtttatatccgttcagtagtccaagtgccttgacatccctctgatttcagggaaggacaccaggatacagctgggattggatattggaaggagtcagttagttgagccattcaaccagaagctgggtgatttgtgcagaagtaggcttagccaagagttcttagcaaagatttcaaaaggacctttgggtgtttttttttttttttgtaagattaattttcattttaaagctctgtatattgtgttgaggaatattcctttatactgtgtgaagatgtgtcactgtgattggtttaataaggagctgaatggccaatagctaggcaggaggtagttaggcagaatttctgaggacagagaggtcttctggaaaaagaaaggcagagttaccagccagaggaagaggaagcagggcatgcaggaggagaggtaaaagccaggagccatgcaacagaatggagattaatagaaatgggttaatttaagttataagagctagttagaaacaagcctaagctaaggccaagctttcataattaataacaagtctctgtgttgtcattgggggctagtggtccaagaaagcctgctccagtgttgtatgtaagtgaggtgagagcaggggcctgaggaggccagagatgttggatcctctggagctggaaattcaggtggttgacttgggagccaagactgagaactcaacttggggcctccagaagagcatcacacgctctaaagtctgagccaccaagaccagcacaagaacttcagggatctgaaaatcataaggggaactcatttgtttttgtagtaaatgagcttttctatgatgatgacctagaactgtttctgtcaggcttgcttcaaatctgtgtttgggattttatttgtccgtttgctttattttgttttctgagacagctcttgctccgtagtccaggctaaccttgacgtctgagaggtcttcctacatcaacatctggagtgttggaatttcaagtgtgagccaacacacctggttcctttataatgctgttttaaagcattttatttcagcttgcaagaaccaagattatttttgccttttttccttaacttttacgtacacacagtatcagttagtatcagactctttggttgtaaggaagtaggtctatacagcatgcccatgtatgtactaagtagtgcaggtagtaatggtgtagacacctgtgcttgctttctcaaccaggactgtggatatccaaggcaaatgctgtggggcattaacctaaaacagtgattctcaatcctttggtggttgaattaccctttcaataagggtcacatatcagatatttacactacaattcataacaggaacaaaattacagttatgaagagagaccaaactaatttatggttgaggtcaccacagcatgaggaaccgtattaaagagtcacagcattaggaaggttgagaaccactggtctagaagttcacctctctagaaaattgtgtgttgcaataaaaaagtgacctcttagccagtcctggtgatccacacataatcccagcactcagaaagctgaggcaaaaggatcacaagttagagatgaggctaggctacaatagtgagaccctgcctttaaaaaaaaaaaaatgctccctgactttccataatttttctctgtctataatttgtgtaatatacagaacatggttcatagaccttctgttagtaactgcaagtcaacagctggctgtgtatctaatttaattatatggggatttttctacctcacagggggtgggcactctaactgctgtgttattcaagggtgaacgctacctcatagggcaagctgtgaaagagtcttcaatgttcatctgttatttctggcttgaagttcaggtctgtctttttaaaatagctgagttaaagtatcagtttcatgcgtgcttgtgtgcgtgtgtgtgtgtgtgtgtgtgtatgtgtggtgcatcttcatgtgtgtgcatgattgtgcctgcggaggtcagaggttggtgctggccatctacctcaatcgttcaccaccttattttacttttcttgttttggttttcccagacgacagtcctgtctgtcctagaactcactctgtagaccaggctggtctcgaactcagagacctgcctgcttctgcctccagggtgttggaattaaaggcaggcaccaccacctcctagctccacctgtttttcaagacagggtctctcactgaacctggtgatcaccagttcaaacagattggttagacaagccccagggatccacttgtctccacctcctgagcagtgggattacaggtgcacaccaccaggtgcacaccgccaatggctgctctttgtgcatgagtgctgggaacaaaagctgatcccatgcttatgcagcatgcactttgctgactgagtgctctctcccccgccccacaaataccagttttgaagacaaacaaatcaccattgttgctttatgtatagttacagacttaattaattcttattaattatattaataataataataatatgaagctcagttgttggtttgggggttgtttatttgtttgtttttttcccctgaggcagggtttctctgtgtagccccggctgtcttggaactagctctgtagattaggctggccttgaactcatagagctccacctgcctttgctccaagtgctgggattaaagccatcacccggctttttttttttttcttttaaagctcagttttatcctttaaaaatcgaagtttcagcctaattacatacagaattccaggacagtcaagaatacatagagagaccctatctaaaaagaaaaaaaaaggggggagggaaccctatccatcaagagctaggactcactgggtagtggtggtgcacacctttattcccaacactcgggaggcagaggcaggcagatctctgtgagttcgaggccagcctggtcttcaaagagagttctaggacagtctccaaacctacagagaaaccgtctcgaaaaaccaaaaaaataaaaaaaataaaaaaaagagctaggactcagccccataatagcactgttgtcctgcatttagtccctgagacccatatagttgaaggagagaactccctacaagatgtcctcctctacatgtatgacatggtacatacacacacaaaataatcaataaacaaaggcaaacacatttaataatgtctcatcaaaaaaagagctcctcagccttggccatcctgcagttgggaatccagtgtcataagtgttccaagagggaacatgaaacaaggaagtaggggtgggtgggtgaagagaacacccaggcaggagacaccagaagcaaaagggaccttttggacaagaggaatcagaacaggggtggggggtgggggggtggggggtggggggggagactcttcttctttacactcttcttcaattcacttttttatttatttgtttatttgttgtaatggaaccctgtgtggtacagggctgcctcagcctcccggatgctagcattacaggtatagtattctggttctcatttcccttacaaaataaaatggaatataataagtcaaggttgtgcgccccagttataggtgagagagttttgtatgtgtatcctggttgttgatgttttcctggggagtggggtaatgctgaacattgcacagaacaatgagaaatgggcttgtgtctgctctgagtattcaaacggaggcaaacaaacaaacaaacaaacaaacaaacaaaaagtcttcatagtgaacaggtaacctggggcaggggtatacccttcttgacacctggctccatcaccttcaggtccttttccaatgaagaaaaccctttagggccctatgtcttcttacccttgccaaagtcctcccattaagtatacttcaaaatatttgttaatgttaaaaactcaagccaggaggtagtgcatgcctttaatccatcgctcaggaggcagaggcaggtggatctcagtgagtttgaggccagcctggtctatagagcaagttccaggacagccagcgttacacaggctaaccctgtcttgaaaaaacaccaccaacaaaacaaacaaacaaaaagcaaaaaacaaacaaacaaactcaaggtaggcttgatggctcaaacctgttatcccagcactcgggaggctcagtcaggaggactgctgcaagttcaaggccagtctgcccacagaatgagttccagccaacctgagctacagagtgggaccgtgtctcaaacaaaaacaacaataacaaaacagggctgtggagatactcttgctgctttagacaaggtttggtttgcagcacctgcatggtggcttataactttctgtaactctagtttcagcagatgcaacacttctgaaccctctgacaccaggcgctcacatggcacacatacatacatgcagacaggactgtgatacacataaacatagatcttgaaaaagaattacaaaattcaaatctgtaagtctccatgtggaagactcctctctgcttgtggcactgactctcctctcccagaatgttgctcaggcaacctctttttaagaagaaaactaatcaaggaagcagaagagaatggcccactcgaccggctctattccctcctatgtgccaatgttctaaactcacatttcgttggctactttgcctcttagtcataaacattacaaagcccagacaatgacagcaaaatagtccagatgcctacggttagaaaacaagtaaggtagtaattacctaaatgtggaaagaaaagaggacccaacacattgcaacccagagtgtggcagccccaatgcgcactccctggaaacggtggggggggggtgtgaaacggtgaagaacacattgattcatttgctgtagttattccaaaacatgttggaacttatttgcattgaattgaaagcctatgtaagttttatatgttgctaatggacagaagatccctacttcaggaatatcatgctaagggtaatctttaggcataattataatcattgtgttattgtggctgctatcaaatatttatagaacttcaaaaggagtgtgacaacactgggatgggtagtagagggattatgtgtacaagcctggccccacacacttgcttcatttagaaatattatttaccaagtatgcactgagggcctgttttgcttaacgtgctagtgagactttcaaaggacacaaacatgaatggtcccaagaaactacgtcctgtaggggcattacatatatacacatctgtgtatatgggtacatatatgcatatctgcaatacagattttagcttaaaagtcataaaatgtgatatatatatgtgtgtgtgtgtatatatatatatatatatatatatatatatataattttaaaagtggataaaatgcattgcaagtttacttctgtgtttggcactgatggaaaaacgttcccggagccagcttgcctctcctgtgaggtggtcatgggtatatcatttacagtatgtggagaagacaatggaggctccaactgttgcactctcttcaggaagccatgatgacgggcaggattagaacctgggcagaaagcagaatcagatcactttcagctggtacagtgtgtgcattaggtcactgccttggtactggctttttgttttcatttagttgctgataataacattatactgtttcactgtcaccaaagctaccctcctcttggcagggcgatcctgacccagtgaccttttgatcttgacctcagagcaccattgtctaacccagtagttttcaaacaactgagccttcttttgagactcaaagtcttctcctcaaacaaatgttgagtggaagaaaaaaaaatgaaaagttctctggtgtggctgattgggagtgaggaggagcaaccttcccagggctgcagagtgggggtggggctgggggctaccacacattcaattgaggattagcactgctgaggtctaataggaaacgctgctgctaaagaataccgcctgtcattgagggaacatctcgttcttcaccttctgttctatggaggggcagcatcccagattgatgggaagggccctaaatgaaaagtagcaccggtcatgttagtgcatcttactgtatcttgtgtaactctctttaatcgagttttgttgttggtcttttctcagtttgtttccctttttcttttttgcagcgctgaggaccaagtgttgggtaagcaagcactctctcttcctctgagctacagcctcagcctagcacgcacctgaggaagaagtcacagccaagaatagcagtgtacctatctgacagtcatgaacctcatcagaaaggtggatggtgttgaaggtgggatggcagaactaaggaatctaaggagacggttggaagagcatagctctctgtgatgggatctgactgccacccacccacccccaacacacacaccatccccatagacctgctgtcctggaactctatctatctataacctggctgggctggaactcagagatccacctgagtgctgggactaaaggtgtgtaccaccactgtcggcttcttaagaagcttttcatgagtgccacgctcagagaagacctggtatgtataacacagagctgaatttaaacaaagaaagcccaagtcatcttttctcttccagccacaattgtcaacctgacaaagcccagccagaggagggcacagcctcactggctggggacaatggcttgagtttggggtactcattctgagattctgctttgacactcacagccaaggcaattatttatagttcccttccaaggccctattgtctactgtggcttctgtatttctctaggaagcacacacaattctatgaagccattattactgtctaaacaaataacttcacccagcccccttcactgctgtaggtcctcagaaaggtcattcacttatctaacctttgtgtgtattcaatatttgctcatagctgtctgtgtactttaggagctcttctctgtgtcgccctctatgtatctaagagtcctggtctactgcactctcagtaaccgaccagctaatttgcaatatttttattgtgactgtatttttgaaaagttggaaataatccagtggtcctaccatagagaatgtttgagaaagtatggcatagcaaatgggcagaacaatagaaatgctaagaaccctgcacatggtgttaatcagctttgtattactgtgaaatatctaagaagaggctggagagatggctcagcagttaagagcactgtctgcttttccagaggattcgggtttgattcccacgaccatctgtaattctagttctagatgatctcatgaccttttctggcttccacaggtaccaggcacacatggtacgcagacatacatgtaggtaaaacactcatacacaaaattaaattaaatttaaaaataaataaaatacccaagaaaagacaaattaagtcctgaggaggcagcttagccaataacacgtatgtttcatgagcatgaagacctgaattcggatatccagctcctgtttaaaaatccagtgtagcagtacacatctgtaatcccagcaccagggaggcagagacaagcagatccttggagctccctgcctaagccagtctagctgaatcagtaagcttgtgtgtactggtgtatgtacatatggaggttcatagacactatcttcctccattgtgctctaccttatttaaaaaaaaaatattttttttcaaaggacctaggttcaattcccagcacctacaaattagctaaaaactatttgtaatgccaattccaagggactcaacacttcttctggcctcctcggacactaggcatgcacatggtacacagacatacctgcaggccaaacacccatacacatataattcttcagaagattaaaaaaatatttaaaagatgttaattaaacatatatacataatctgttggtggggccacaaattattccaacagcttcagacaaatatgatgctgaaggttccttcctcagggctcatgaagctgcattcatgccttttgtcatctggaagcttgacaagagctgatggatccagttccaaaaaagggctctgactcgtacaattgttaggatcttatcaagtgtgccgctctgtgggggcctccctgtgggctattcatggcctagtattgggattccaaagcaatacagagaaaccctgttttgaaaaaacaaaaacaaaataaaacaaaaaaaacaaaacaaaacaacaacaacaaaaagaaaatgaagttgtcacttctattccagctgaatctccttatctcttaacaatggagctacctatagaattttcccccaaagatattcctagagagaattgttgccttttaatactcgctatattaattgccatgtttgtctattttttaagcaagaggatgtgtactaagattgtctagaaactgctgggtggtggtggaacatgcctctaatcccagcactcaggaggcagaggcagggggatctctgagttcatggccagcttggtctacagaatgagttccaggacagccaagactacacagggaaatcctgtcttgagcccctccccacccaccaaaaaaagtctaaaaatcacacaagagctgcttttggctgaaaacagagataaaggagctcggaagtgaaatactccactgcccaggcaatgggcccatccctcggcagggtggctctgtaaaactgaacaaatatttatctttgacatcagaagaagtcagttaagcatatgatgtttgataatgagtgagagacttccttcctttatttattctggataatctattaaattttagtgtgggtttattcccccagacatagaggcattgtctgctagaaggtcagcactcattgtgctgcctagtcaagtgtatgaactataatcttagtcatttctgcacaccagtatgccattcaacagcatcataaaggtctccttggcacagcattttcttcaaaccagctaatcacatcaactgtagtgatagtagctaaacttcattatatgtactaaaagctaggagttgcacctgtgtttcctataacgcattcctctgttctacataaaacatgttataactatatagtccagtgagttaagcaatttaccctactcatatagtcaggacagaggctcaaatcaaggtcatctgtcaggcaggtccttaaatccggccaggttcaagaactctggctctggccattggcctaagcacttagccttacctggttgtctttatgcaagttttccagctcacatgtaggtctgtgcatcacatgcatgtagtagtgcacacagaagccagaagagggcatcgggtcccctgggactggaattacagatagtgtgagcagccatgaggatgctgggaattgaacctaggtcctctgaaagatcagctcaggctttgctttattctgagtaatgtcttttgtggaggttctactataacagctcccatagactcatatatttgaatgcttgatggttagggagtggtgatacttgtcagggatgaggaggtgtggctttgttggaggaagtatgtcactgagggtgggctttggggtttcagatgctcaagccaatcccagtgtctttctctcttcctgctgcctactgaatcagatgtaaaatctctctctctctctctctgtctctctctctctctctctctctctgctctttctctagcaccatgtctgcctgcatggcaccatgcttcccaccatgaagataacagactaagcctctgaatgtaagcaagtcccaattaaatgctttcctttatgggagttgccatggatgtgatgtctcttcatagcaatagaacatcgactaagacagctcctgtctcctgttaccaggacagcaaataggactaaccaaagggaacccatggctcttccccagccgcttggctagataagtctctttgtgactacagatgggcatgagagttgttttttagatgattgagctgttctaaagctagatggttgtcatggacactctataaattaactaaaaatgttgccttctttacaaacatcccgacttacactcttttgaactccaagagcatcaagcactctgtaggaaccatacttcggattttgaattttgatcttttctggactagcgctctgggcaaaaatactctcatggtgctgggtgttgacagcgagctgctgctacagtcagccaccagatgatgagggaatgacagaccctgcagtgatgtgtggctaaattgtaccatttccttaggctaggtgcatccaaagtatttccaaccaaggatgctgtaaactcacaataggcttacagggatgaagggctgatgggaaggaacccctgtaattcagatactccatttgacagtgtataaattatacttccacaaaaccctctaaaagagtttctgagtatattttctctgatgggggtcacatgctatttctgcatctatcattggctaaaatagtgtgattgaatgattggccaagcctgatgaccactcccactcctggaaggcagggataaaatcagtttcctctttctaaagcacaatggctgggaatggggagagggtggttcccagtttaagtagatgcacttaaggcccaaggaccaaagttgacctttgcctagtccagggttcttgggcctctccgaacacacacacaggcctgctgtaagccaaagcatggtgacaatgctgtcatcaaagcatggacaaaatgctgtcacacgatgtctaagctttgttgtttttgccctctgtatgcaggcctccaagtaaagcagaaggccgtggaaatggtctggaccatgtgccagactcttatttatagaaatactgaaaaaaaaaccggcatgttaacatggaaggggaaatgtcatggggcctcaaacccagacaaagaactacaagtcattaaggaatgtcaagagagggagaaggggtctcccaagggaagacccctcagattggttgtcttctacaaaatggtcagccctaaaatcatatccatacaggtaacgttatacagactgaacaggttgtatttatgtatttacaagtgtgtgtgtgtgtgtgtgtgtgtgtgtgtgtgccatggattagaaggaaaataggtgggggtacatgggaatagttggaggaaataaagacaaaggagaaaatgatgacctcatgttttgttttgagacagggtttctctgttttgtgtcctgactgtcctggaactagcgctgtagactaggaaggcttttgaactcacagagatccatctgcctctgcctctggagtgctgggattaaaggtgtgtaccaccactgccctgcccttttttgggggggggttattttttaattaaatttttttttttaaaagcaagtccttgttcccttatccagcgcccaatcagtgtttgcagggttgaacttgagaattctcagtgcttgctgaagtgtggtcacagactacggggtgatccctgccaccttcctgtgaccttctcagcaaatctctctctctctctctctctctctctctctctctctctctctctctctctgtctgtctttctcatctacactcatttgcctttacttcccaacccccccaccccagggtatttgactcggtgatccctagtatgagccctattctccaaattcttgggttggcctctgcaacagcagttctcaactgtgggccgggacccctgcggggggggggggtagaaggaccttttcaaagtggtaacctaagaccatcagaaaacacagatatttacattacaacttataacagtagcagaattagtttacgaagtagcaacaaaaataattttatggttgggggtcaccacaacatgaggtcaccacaacattagagggttccagcattaggaaggttgaaaactattgccctacaacattctgagctttctgtgttggtggggagagcttaggtgtgtgaagctctgactgaagcaggtcgggctggtagaaagtcataactgagaagcacccacttagtgaacctgctacatattaaccacttgaaaccctctggcagctgacttttcactgctgagcacactggacattcccaagcattccatcacattcttgtgaggaagcctttccctgcctttcacaacaggctctgggaagttctgtgactgggacagcatcggacaatggttctctgaacgtgaccttggcatcccactcactgctgtagcgttggagccacattgaccattcgctctccctcacttaaaagtagctctcttggacaccttggattaatctggcatttccccatttagcagactctccatgactggagagtccagggcaccccagcatctcaggaggctgcagtttgaatccatgacagacctatgatctttatctcacgtggccctcaaggcctagacattttcatagctttatgctgcacagagtgagtccatggctgaatgcacaggaatgcaaacccagcaattatttaccaggtggagcgtgggctctgtgcttctttctggcttgtggtacctctgtcaagtgtctgcttctagttttgatggactgtattctaaacctgttttaacctgattaggagaaaaagaatcccatatggaggcaaaagaatctccatatgaagggccatctggagaaatgggagtgtaataaatcactgtgagcatcagtttgacttgctgggggcccagttattttcttgcaagtggaaacaggagaaaacagcattgactcctgaattctgccgcgaacgtccttatgggaaagccaaggtccaaagactctgggctgttgtcagcctgagaagaaggtatattatctgggaaatgcaagacatccacatccccctgcttccctttcagccatagtcatcacaaaaccaacttttctgtaaaaaaagaaaaacagtctgtttatctatattcacatgcttttcaaaggcatcgtgtttgcaattttcactgattcactgtttggggtagaggtttgccagtcaatgcagtagaggcaaggtcaccaccagtacagacctaacttccttagcctcttctccatctgggaaattacctaccacagtgaaatacttggtactgaggtaaacaataaacaggaatcttctgtgagaaaattaaaagaagtctacataaaagaattttgatgttatttcaagacagggtttctctgtgtacataaaaataattttaaatggtataatttaaaagagcaagatagggattggagagatggttgaacaattaagagcacttgctgctctcccagaggacttgagttcccattccagcacccgtatcaggaagtcgacaactgcgtgtaactacagctccaggatgtctaatactttcttctggtttctgaaggcactagcaagcacatgtacgtacacacacacacacacacacacacacacacacactttatttttttaaaaagggaaatagatgaggtattaataccaggaaatgggttggttgcataaatttcatgctgtgggtcttgcccccactatgagcaaattctcccatcacattctttccccttaagaggtggagaactgacccagcgaggattattgtccttaatctttaatcagtgatcctaatctcagccaacgttcttttcctactgacaactgcccttcctctttggtgagaatcacatgactggcatctatgtttttgggaggcgtggcccccatcagttggagaaacccaaagaccaagaaatgaagagccgtggtgatatagagtccccagtctagctcttagagatcaagagacaatcccagaaatttccataaattccctttcttctcaagattctgatagctgactttgctacatgaaagtgcaagaatttgactgacagtttgccagtcttttagatagacaattaggaggaccaccacagcagcacgagggagtgatttttgaaggattttataaacagcaagacagaaaactgtgtgaatgatatattaagtaattaattagataattgaatttgtagtatgaagaattagacccaaggcctcacaaatcctaggcaagtgatttaccactgagctagacatcttgcctcctttctctctcttttgaaaaatttcttacttttattttgtatgtataggtgttttgcctacatgtatgtatgtataccatgtgtgtccctggtgcctgtgaaggccagaggaggccatcagatcttctggaactggagttgcagacagttttgagctcatgtgggtgcagggaacagaacctgggtcctctggaagagcaactggagcttttaaccactcaacatctctccagccctgcctaggttggccttgaactcactgcatagtccaggaagacctgaaacttgtagtgagtgatccatgtgcattatcctgccacagaggtgagaagtatgagctgctatacccagctacttagaatactgaacaagtgggaagaaaaaaaatacctgaaaaatgaaatgagtgttcaacatgagacagcagtgggggcgttttcaactccacataatggagttgaacatttattaaaccatgttcaggcctggcctggtttatgcctggtttcatgcctttaatcccagcacttgggaggcagaggcaggcggatcgctatgagttctaggccagtttggtctaaagagctagttctagagcaggctctaaagctacacagagaaaccctgtctcgggaaaaactataacaaaccaaacaaaaacaaaacaaaacaacaacaacaaaacaaactaaaacaaaaacaaaaaaccccaaacaaaaaagccatgttcagttgtgcaaagtaaatttggctcatttgtttacttgagggttctgatggccagggcacaggcctgaggcactgcagcaaaggagagaacacgggagagaacatcaccccagtctgcttgaagtttcttcctagcttagagccatggattccagaaaaatcagcaagttttttcctgcaggctgctcaccaaaaggcagacttccttttagagggagccgtttcaaataagagcactaagacactaagatagccacaatccacaccgtcagaggagctaggaagcaaggaggatcccaagagaagattgcatagtccctcgaagaagggaaaggggacaagcatccctgaggaaattggaagcacggggcagggtgtgtgtgtgaaggggagtaggggaggggggaggagaacaagaggactgagacgggagacagtacaggtttggcgagaggtctggcacaggggatccacagggatgaccccaactaagaatccaggcagtggtggagaggatgccattgatgtcctttaatgagactgatgactaccttggttgccattcctagagccttcatgcagtagctgatggaagcagaaacaggcacccacagctaagcactgaaccatactcctggaatccagttgtggggagggaggagggatgaacaaaggagccaagacagtgctggagaaacccgaagaaacagttaacctgacctagtgagagcatggagatcctagtcgtaaagctggggaaccagcattggactgaaccaagccctctgaatgtgggtgtcagctaggaggccaagacagtctatgagacttctaacagtggagccagtgtttatccctagagcacaaatggactttgggagtccactccctatggagggatactgttgcagcccagatacagcaaggagggcctaggctctcccccaaatgatatgacagactttgacggtccccctgtggagggcctcactatccctggggaggaggtaggggtgggttgagggggttggtggggaacatgggaggatgggagggcaagggaatggggggatggatatgtaaatatgagtgcccctaaaataaataaatagataaaagtaccttgcccatggaatgggtaaagaaaaggtggtacatttacacaatggagtcagcagttaacaatgacatcttgaaattttcaggcaaatggatggaactaggagaaaaaaaataaacatcctgagtgaggtaacccagacccagaaagacaagtgtggtatgtactcactcgtaagtggatattagacataaagaaaaggatatgctgtaatccataacacctgagaaactaggtaaaaggagcaccataagagagacatgcatggatgccccgtgaagggaaaatagataagatctcctgagtaaactgggagggggaggggagggaagggcggaagagaacatgaggcaatgggatgggtgagctaggggagggactgagtggaagagcaagaaaagagaaatcttgatagagggagccattatggggttagggagaaatctggtgctagggaaactcccaggaatccacagggatgaccccagctaagactccgagcaatagtggagagggtgcctgatctgatggccaccctaactgtcatcatagaacctttattcagtaacggatggaagcagaagctgagatccaagctaaggactgagctgagctcccagagtccagtggaagagagagagcaaagggtcaagatcatgatggggaaacccaaagagacagctgacttgaactagtggcagctcacagactctggactgacagctggggaagctgcataagatagaactagcccctctgaatgtgaatgacagttgtgtggcttgggcagcctgtggggctactggcagtgggactaggatttaaccctggtgtatgaactgacatttggagcccagtctctatggagggttaccttgcttagccttgatacaggggatggggcttggtcctgcctcaatttgatttgccagactttgttgacttcccataggaggccttatccttactgaggagtggatggggtttgggtggggaggatatggggggcggagaaagggaggaggggaggaagggggaaaggtggttggtatgtaagatgaaaaaaaacttttaaataaattaaaaacttaaaaaaaaagcaacaaatccaatggcttacagcctgatgcacactgccttcaagtgtggctttttcttcccagatgttttctgggaataagactaaaaacattttttgtttttcaagacagggtttctctgtgtagctttggagcctatcctggcattcgctctagagaccaggctggcctcaaactcacagagatccacctgcctctgcctcccgagtgctgggattaatggtgtgcgccgccaacgcccggcctgactaaaaacttttgtgcatcctgaaaacagcttcctctgtgacctctgagacctagggtctcaccttatcagctgtcatcctgcccagggcagctcagagagccccctgtgatctcattaagttcctttgagatgcagtttcagaagccacccacatcctatgtacactactgtaaagacacctaatggggaaccttctcctgagaaagccacgcccacacacggtttgtgcgtgtattttctctgagcacctcccatcaactcccatgcttgaatctgtcataatctctctctctctttctctctctctctcactctctcctgagacagagtttctcagtgcagtcctggctgttctggaattcgctctgtagaccaggctggcctggaactcatagagatccactcgcctctgcctgcgagcgatgggactaaaggcgtgcgctgccattgccttacaagcacttcttactaagcaccagctccaactgtgctttacactaactggtcctgacatgtattattattattatcattattattattattattattattattattattattattattattattatatttacttgcttattaagggggtgagcatgccataacactgtatcaggcagagaacgtgcagctgttattctgttattctctccctctactatgtgggtcctggagattgaatctgggttgtcaggcttggcagtcagtccctttccctgctgagccatctagatggctgttatgtttttatttaaaaagaggaaaagagaaagctgcaagatgagacatgttaactagtttattatatggcccggcagagtatggagactaagagagaagaggaacaggggtaatagctgaccgccatggccggtcgccatagagaggtagagagagcttgtaggtgggagaaaagcagagaaggaataaacagagagagagcataaagagaggaagcagagagagagtagagaggaagcagagagagagagagtgaagcaggaaagttggagcttttaaagggaagactgcgcatacgtgaggttccacgcatgcccagagtcatcatgcgtggcggtgacgtgatgacgtagcacgttttcctgtgttagggggcaggttctgtctcttaaagaggaagcgccgatcagcgtcaaagcctgaacctttcaatagccctgctcctgaatcttttttctttggggaagtcatcgagtctcatctgagtgtggagtcatctacaaagatctcctcaggctgctacacacacctcatggcgctgtgtttccagctcctaccccactgctgctgacagtctccagcctttcagtgaggcagatccaggcatctgatcttaaaggccaaagctaatttccttagtgccatacctcaagcatgtcatgttgacctcactggggttgaacttgggctgtcttgcaatggtggcctgggtggaatgatcccgaggtaggttacatacacaaaggggaaactgaggcaaactccattatggctagaggctgtagcaactgaagaactctaattaggaaaacatcatgtagttgctcaaacagcacaaaacaaggctatcccaaaccagttgtgaccaacacagctgacccagaccctcggcaactatcttttgctttcctgcaatagtgtctttgtaccacctgatttgcaaacttggccattctcatcatgcttgtgatgccaggacacagccaacagctccgtgcaacaacagaaaggggaataagccctattattttaccccattctgggtttttctactgtcctagtttgcttctgttgctgtaatagaacactagccaacaccagcttggggaggaacaggtttatttggctaacacttccagataactgtcttttactgaaggaaggcaggacaggagcccaaggcctggatgctcttgtacactgtaaagatttgccactcgaattggtttaataaaatgctgactgtccagtaaccaggcaggaaatataggcagggcaaccaaactaaggaaaattctgggaagaggaagggtggagtcagaggggtggagtcagagagtcagtggcaaatgcagaaaagcaagatgagatgctgtactgagaaaagtaccaagtcacatggcaaagtatagagagaaatatgggttaagtataagagttagtaacaagcctgggctattggccgagcatttataagtaatattaagcctccaactcaactatttggaagtgaccactgggtatttgggaataggcaggctggagaaaaatatccagttacacctggcggcaggaactgatgcagagtcacacttgaacactgcttacgagatttttcaggctcacactcacctgtcttttatctcccaggaccaccttctcagagatggcaccaaccatcagtgggctaagccctcccacattaatcagtaatcaagaaaattccacatagtcatgcccacaggccaatctgagggaagcaatcccttaattaggctttctcctcccaggtaactccaattagtgtaagccaacagaaagtacccagcacgcctacctttaaagtatacatacgatcctcctcatcattaagagtcccatccccagggtgggacttccttgagagtcccacacctccccttgaagggcttttattgttgttgttctgagatggtctcactatgtagtcctggctggctggaactgacggcaatctccccactccgtttcccaaggcctgagactgtacacttatgatctaaagtaaacttgctcccaattccttactttgactcatctctgatttttttctttgctggtggaagaacctgagaacgctgagttgaaggtttaatctggcctctgttctctgagacttccctagccttcaccccccaaggcaacacttctcccacaggggctttgctaacaaactgagcatgttgggcaatgccagccaggatacaggtaggaaggtgggtgctatgcaaatgatctcagtcatgtgacccatgctgtagactatccccttgtccctgcttgtttgcctgctcctattctcagtgcttctcactttctaaagagattacctctatttctgcttcttcctatgtgtgcctggtgcagttgtttgttctgggacataggacttggaaacttcagtgtatgtcctccagacacctacagcaatacctctattaaatagaccagcagctggatttagggggcttcttagcaggcaagttgtctggctacatgtgtcatgatgtatccgtgcatctgtatgcgttagcacaatgctgacacacccatgcttgcatgcacccaatgaattaatatttggcattacaatttttgttttccaagatagggtttctctgtgagacagggtttctctgtgtagtcctggctgtcctggaacttgttctataggatggccttgaactcagagatctcctgcctctgcctcccaagtgctgggatcaaaggtgtgtgccgctgctgccaccacccttgtcactgccactgccccttctgccaccaacactgccaccaccatctggcaacaattttaagaaatggggaagtcagtagagagctggctcagcagttatgagtgcttgctgctcttgcagaggacccaacatccgtatgtttccaacatccgtatcaggtggctcataactccctataactccagctctagaagacacaaagccctcttctggcctttgcaggaaccctgtatacacttgtgcacacatacacatacattcatgaataccctcgcatgtgcacacccatacagtgaaataaatcttatgaaatatttgagaagctcgattaagaaaaggtgacattttaatagcaacaacaaaattgacttgggggaggaaaaaaagtctttgaagagctcatttgtgtttattttgctttttctcattgtgttttagaggccagacacttctctacatgatacagatttgtgtcagaagtctagctccgtgggtggagtgctcacctagcctgtgtggggaaagggtcttggttttgagcctgagctccacagaacagcagcaacagcagcaacagcagctacttccagttaaaacctgaaaccacggtgtgaggaatccattaaataagataatgctgatgtgaagtactcttaaaaaaaatggtgagacttcagaaaaggcaagctagctttccagcacattttgcagatggtcatggagatgcatatcttggaatgcagagaatgaagactgctatggcaaaaatccttggtgcactctcatagtcaattgctgagcaggagccacgagaagtctgggaagggaaccctggatggtatggaaacagagagctaggtaggaatacaagtggcctgggatcttattcagctttgtccaatactacatagaggccattgaaaaccccctctgtagggatctggggagatggctcagcagttaagagcattggcaactctggctgttcttccaaaggaccctggttcaattcctagcacccacatggcagatcattgtctgtaactccagttctagaggatatggccaccctcacacagacatccatgcaggtaaaaccccaatgtacataaaaactttttttttttaaagctgggcagtgatgcacatctttaatcttagcactcaggaactcaggaggcagaggcaggcaaatccctatgagttcaagtccagcctggtctacagagcgagtgccaggacaggctccaaagctacacagagaaactccattttgacccccccccatttttaaaaaaatcccctccgtagtctatttgcttacctttaaatatcatggatctgggctggtgagatggcacaacaggttagggtacttgtcatcaagtctgaccacctgacaacctgagtttgatcctgaggacccacatgttagagaacaaacttggaagttgtcctctgacctgtgttcatatgtcacacaaaataaataaataaaatgctacacacagagaaagggagagaggggaggaggatatttaggggtaaagagatatttagggctcagagcacttgctgctctttcagaggatctgaatttggttcccagcaccacagcatcacaaccatctataactccagttccaggggttctaatgccctcttctggtctcctctggaccaggtatgtacacaggtaaaacacacatacacataaaaaactttaaaaaaataaaagatagaagaggggacttacatgtgaaacaagcctgttccctaacttgaattaataataataataataataataataataataataataataatgaagaagaagaagaagaagaagaagaagaagaagaagaagaagaagaagaagaagaaaaataaaagatagatacagacatcaaatccctgagatttctcaatataaggagctatggggaaaaaaatgtcctcagagatgagatggttttccctggagctttgctgtcaatctgccaccactgtgtctggattccaattctattctggtcttttgacttattttattttttgttgctgtgataaaaaaccatgactaaaagcaccttgtggaggaaagggtttatttggcttccatgtcctgctcatgtccatcactgagggaagtcagggcaggaactcaagtgggaatccagaggagaaacagaagcagagaacatggaagagcagtgctaactgacctgctcaccacggctggctcagttggccttcttaaactacccagaaccatctgtccaggggttactcaacccccagagggctgatcacgcccagtccatatcaattattaatcaagaacgtgccccacacacttgcctacaggccagcctgatggaggcaatttctcaattgagattccttcttcccacatgactctagcctcgtgtcaggttgacaaaaaacaaaaaacaaaaagcacaccagtatacttgctcaacttcaattcaggagaggcagaaaggaatgtagggataggaagaataaaagggtactgggagataagtattttgaaaagtccctggttattgtgggctcctccactgatgcaataaaccaaatcaaactgatttaataagaccagatttaataaacagagcaaagcaactcccaggtgagtttctggaaggcaggacagagagtatgtggtaggtcttaaatacctggtaggcatggtcttgagcagctcctgcggtggggtctggctggaatgggaggagtggggccaggttcccagccccactggacagggtttggaatcgggaagtaagaccagagcagagattcctaacactgggtggtgaaagagttcaatcaggtggtagagtgtggagggaccgatatacacacacaagctttagagaaatggtacaaggaagggctggggatcagagggggaaaaaacattgatcttactttgttcattaagtaaatagtagctgatgttcacaagcctggcctctgatgagtgtgttgtccgtatcatctcagtcagtcctcaggcatcttacttaacagatgtgtgagaaacttagtcttggaagattaatcactggccctgcgttgctgtattagttacttttcatgtgatgaaatatctgatagactggactccagggagaagaggtttactgtccattatgaaaacaaacagatctgggctctgtgtccacaccaacaggagcttattcgaggcttgtcccatcccggatgatctggaaatagaaccagggatgggttctcactcttgaaagcacacccctaatagtgtctgtccattagctagcccccacccgaaaagagtccacagggaaccaagtgccaacaagtgagctggagccactcttctcaaagtatcacaatcacacttggaaagaggcaggacttgggcttaaacctctgtcctgactctagagtgagtgtgttcatgaacacactctaattaagggaatgtcacttttgctctcaagacaattcacaattagcctgatctcaaggctgacctaaaatgatgttgtcaccccttataacaggcagtcatcagacagactggcaggcacctgtccacacactcacacactccctgatgccattcaggaagtcttggtgaggaatattaatagtgcataatataaatagtcatcctgtgtggtgagggtgttgacacacagggagagcctctgtagccagttaattagctccatcttagtctaatggtgaagttaactcttgctctgagttcaaggccatccctgcacagccctgcagatgaccgaccacaggttgctgaggtttacgcagagaaaacacataaataaggggtaggtgactatccccatccaaccatatcagattttgttagcacagtacctatcaaaaacaaaacaaaacaaacaaccaaacagttagcctcattactggatacgtgcaggtatctaactaccagttatggttgaaggtcacagagctgtgatgtgatgatgctcattagggcttttccctgacatttcagccgcacggttgtgagagcctgcttgggaagtctccaagggcgcatgccttccctgactcttgcctttctccacgtagggatagtctgagtcttataattaattagactcaggttaaaatttgcattgcagtagttgcctccgtaaagaagcatcacaatccagagtgttgcaaggctctggagaaagggggtggggtggaagggttatatatttgctaatagctctgcaaccttagctgggtcccatggttccacagctacttcctccccccatgcttttatttttctcaccaggtgggactgctctgcactggaaattcaagatggctcctccaatatgtcagacgtctagcaaaactggatggaatagctagggcccaggcccccagaatctttttttctctaatgtttgactagcaaggtcagttgtataggtattttaatgtgcgttcatacagggctccttggaaggacattacttggtttaaggtgcagttgtcatttggtcttagttgttgtttttgtcaacttgacagacgctagagttatctgggagagaccttcagttgggacctctcagggcagtgtcacccctgggcaggtggtcctatactgtaaaagaaaggaggttgagcaagccagggagcagtgctcttccccgttttccgcttcagttccaggtttctgcctttaggtcctggcctggcttccctcagtaagggaatgtgaactgagggttgtaagatagaataaaccttttcctccccaagttgcttttggtcaatcatagcaataggaatcctaactaagacaccaataccttcatattcttagtgattgtctaacaaggcaccctacatttctatttgcctctgagtcttcaaattacttaaccagtcttcatagacaaatctctttcatgaaggtagttgctggcagacatcgtaaaaatgcttgcctggagatagctcagtagcaactgttttcaatgggcgaaggcaattcacaagaccactctgaggatccggcaagtgtttgcagccatcatgcactttgggttcttacctttagaatcctatgaacagccgatcctgagagagccgcttcagcaggtgtgtcccctccccacactacctcataaacagatggatttatggtaaacagcaagaaatggcctagaaattaggaataactgcatctcaggaaagtggagttagaaactcagatctcaagaccatgtcttgcctgtcagaggtcacactggtttccttggctggctggccagccatggctttgggtgggagaatcggttatcagaaaatcaagtgtctcttctaagaccatgggtagggcagctctctgcacacagctgtgagtaaattgggccagcttggcatgatggaaaagtgtctatttaccaaccatttaagtgccagtaaagagctcgaacctgtagggatataactataaccctaggagagaagaccggcctctttttttgtcacaccagggtgtgtctgttaattataattggagtgggaattggagattacagagaatgggacattgactcttgatgttccttgagcctggggacttggtcccagttatcgctggctggcttgcatgtatccccacggtgtacacctgtgtcctacagagatcccgaatgcgttcctccactgaaagatcaattaactctgggacagcggagtgaagaagggccagaaatggattagttccacttgcttgattttgttccattccaggaaggaagacggcaggtcctcaggaggaagggttcctccatggatagcccagctcttgacccctgtcctcggtgtccggtcttctttgctctgcccccaagttcttggccgtcccttcttccatgccctcagcctgtattgggaagcaccatctctgtccctctgtgcacagtgtcccccttattttcttcttggtctcttcaccatcttcaggtaccattggctggtgctatgccttcccttccttcacacagctttcccggctctctgaggcatggaggaagtgaggctcaatcttgtacatggaggcgttggtagactatggtaccttcgggaggcctcccatccatgagaccaaaggaacaagcaactttcacaaagtgcacttatttcccagtggccaggcacaaggatcatggccaaccccttataaaacagtagctttggccttaagacaggaatcatactgactaggacctcttgcttgatgaccctatatagttgaatgttttcctatcttaccccgtcctactggaccagtttctctctcacccaccaggtccccgaagatgtttgtgaaatgacagtctaaggcttaatattaaagtatatttgcttggccaatggctcagacctattactgactagctctctcttataaattaacccatttctactcatctatgtattgccatgaggctgtggcttactggtaatgctctgatatgttactcctttgtcaactacaaggcatctccctaaccctgccttctttctttcagcatctttgtttggatttcccacctagctatgtttttcctggccactggctgaaacagcttattcatcaaccaataaaagcaacgtatattcacagcatacagaaggacatcccacaccaaccctagtatacatctgggtatgtatgaagttgcttgtcaatcatcttcccttactttaaaaaaagacagttctgcctttaataaagaggagaggacaatcctgcacacagatccaattagactacaaagtaatagaatggtgaggcattttgggaaggatgtttctagaagcaagtgtcacatctgtggttggggttcagggaacatagatgtcatggagggtggagccccccaaccctccaccatagatagctacgtgcaggggcacagggctccactggggcatggtgggctcctgtccccttttctgtgggaagggcttggacctgtggctgtcacctggatcctgggtgcaaacaagcatgcctgaggtggagggtctcctctggtgtccccactatcacctccctcacacttctttcaccttttcgttccaagcacacatctaggtctggatccccatctggaggggccacaggaagaaattttaggactacgcccacttgccaaagttttttttttttttttttttactttgattcctacattgatttctctcagtaacgaaatttcacaactgaatgctttcttgatgaagtgggtgtctccctttctaatctccaggcactctctaagccacagactgcagtgcttttctgccctgcccccaaagcaccccaaagccctctaggcctcctgaaagtgcttgattccataaacttttaaacctgcaattgctagggagccctgggttctcggtggattacagccactgcctttcttgtcagtttctgaattccatgcaatcctctgtagaaacctttttgcttagtgtgctctagaggcattcacgggccccaactgcaaagcaggagtccaggagtgcccccgggggaggctgcagacagagcccagcttctgaccagcaatgttattttaattattgcaaatccgtcatggctgccaagtcctcacttttgttcctgttattaactgggaaccttgcctgagagaggctttttttttttttttttttttcaagtggaagtctgtggactttaattccctcagggggcacttccagccaaggtggacacaggtgggacaatgcagtagtgcatttacttacttacgggagagcatggaagcatgatgtgaacgaggaggcttgcgcaccgagtgagtctggttgggttccaggtcagttatgtatgcaccctctgaggtctgtgaataacccttcttcctcctgcccggaggaccttgctagcctttgccaggctgtgaaaactggcaaggcaagtgagacagactaagcatttgttttctggtaagtcaggcccctgtccggcctgcacctttggcctcgtttggataaaggtttccagcacaggatgcagcgtgagggggtggcatctaaactttctctaggtgttggtttaaggtagagttaccttacattttgggtagcacttttgagtttccaaaactggctctcatatattcagtatctcactggattgcctcaggttggaaggagggttcccctttcacagtgaaaaatttccaaagctcagagtcctaagcaagttggctagttttgcaggagtggaaaaatagagaaccaggacctctactcggtggaagactttctgtgcccatgcagactttgtaatgtctccctgctaacctctagaagcttgctgggtaatgggactgttatccatctctttgtagaaaaaagccagtgaatgaggggcaggggtgaggtagctaggttttcctctgtgtcttccaaggttgtaacatttgaaagtcaccgccttccacctctgctgccagtgttcccaagcggaatatagtagaggtgacaaacattcagctgttaggttagtgccacaaacattctcctccagggctggagagattgctctgtagttaggagcactttttgttcttgcacaggaccagagttcagttcccagtacccacgtggtggctagttattagtcccagtcaggtatatacaagtatccagtgacagccttaggtacagtgacagctgcccctgaaggagagaatggagcaaatctgagccatccctgtccattttcctccaggacttgcttgaaacacaagtgctttcgtggcatgttgggattctcattttcagaaagcagcttatctgtgctgtgcctgggaatgttcaaatgcctccctcttaaacatctgtttagacacatattcagatcaagggccaagcaaggtatgtgatgctactgtttaaacaggagcagcaagctttagctagtttttaatgtcttccttcagaatatgagttaattgcttcccatatgtgcaaacattttgaggctgagaactgagaactctatcctgatgagacaaatgagatgttgcattacagaagccacactaaccatggtctctgaagccttacagcattgagttgtcaaagcaacaaacagaagctgcgcagggaagcattttgcttgtcattcttattccatctttagtatcagtcaaggtcacgagttgtatgaaaaatatataatttaattttcaaataataactttctcttgttcctaaaatacatcatcaaaagaatctgaagctaatatattttgtagcagacagagaacacaaggttctgctatgaaggcagagttgttacccttgtataaaagtccacattgtcccagagtagagaagaaggagaaagtgagagcaagcatacacgaaatcagcaaaatgttacaggagaatcgatcccactttggagaatttgacgacatcagtgatatgtggctaggcaacctatactgtctgtctcccacaattgtcccctgggtaaaggtgggctcactcagcttaacagaagtgaccctcagtccagcaacgaaggaggggcaaacgacaagttgtaggccgacgtattccagattcccagccatcatgagggagaggcttccaaggcgtcctctcacagacatactggaaaatgtttcacttttctggagtttatctttcctccccaccaagggaccagtgaaattcacttggaataggccacaggacagttttccactcttctgtccacaatttgagtttaccttagaaattcaaatgcaggtcagaagaagtcacttcataggtggacagtgaccagccactcagcagaaacatcttaggttttgcttgtatagcattgtgaaacatactttaataaatacagttatgcctcatttacctaccccaccccaatccctggcatggccaagatattccagaatacacttgggtatcattccatggtcatggactctgaaggttccagagcactggctgagcagggactgtgtagtcagtctttggtggctgctgtcatggaccagcgagtccttccgggtagtagggcctcagtcactctgggcaaaggtggcttttttcagctgccttgtgacaactgggtttcacatttcctgaaactggatctgtggaaggagtccctgaaattaaggagagagagagatcacagaaggattaattagcctttaaaaatgggggggagtgttatgaaccagaaagatgttggtcctggggaatttagtaaataaaaagagggatccattcacaatgtacacacacagacacacagacacacagacacacacacacagacacacacacacagacacacacacacacacacacacacacagacacacacacacacacacacacacacacgcatgaatgcatgcacgcacacacacacataacagctacactgtgtagccttggaaatacactaggccaataacaaggtgctgggagaggtcagggttaggttggctggctggaggcctgactccaggcccctaatcaactgtggggtctctgcttcctgccaggagcaggtgaacaaactggatttgtggcactccagtgactctaatgcccaggaagaggccactctggccccttcttacctcttttgactgtcaattctgaatatgggtttgtagagctctgggattttccgctcaatcatgggcctgagactgtccttcagcttgttgtagttcttcctgagttcctgctgatactcccgctgctctgctgtgatgagcctcctgttcttctccacggcctcgccacatctggggtggagaaaggaggttgtgggtcctcagtgtttgtattttagtgacttggagggcaacagcagcatgccagcttcttgagtgcctctgctattgtctgcatctaaaatgtttccttaaggcctgctgctcaaacactggttgtcagctgacaggctctgcagatgtgattggattatggggtgttggagcttattcgtggactagtccatctacagggtcgtgctctgatgggcaattgggagaaataggaggtagcatctcaatgaagggagtgggtaggtccttgaaggaatgaccttgggaggacgtcttgtctatagccagcctcatcatccccttttctttgttcctggctactgtgagatgaacggcctcctccaaagcacgccccacccccaagaagttctgcctttgtgtaggtcaaagtaatagacccagttgatcacagactgaaaccccagaaactatgagctacataaatctttatttttggcaagtattttttgtcaccatgatgtaaagtttacaagcacaacctctagtatgtttgtgtgtgtgattatgatgtttggtatggtgtatgtaaacgtgtgtgatgtgcacatgcctatgttagcactcagagtcaaaggaggacattgggtagcctcctccatcactatcttccttatccctttgaggcaagttctattcctgaacttggtacttatgatttttaccttggcagcacagtaaactgtagagatatcaatcctcaagtctccccttatcctttcattgctgcggttacaggaaggtgtgggaccatgccctgcttgttacatgggtgctgggatctgaactcaggtccttgtgtttatgcagcaggtgcccttacccactgagccatcatggtagccccagtaagtgttttcagaccttgtggtcagcttaccagttccccacagagcaagcttccttccttccttccttccttccttccttccttccttccttccttccttcctttattatttttttttcaagacagggtttctctgtggctttggaggctgtcctggaactagctcttgctgaccaggctagtctcaaactcacagagattcacctgcctctgcctcctgagtgctgggattaaaggcgtgcgccaccactgtcacagaaacgttcaaaaagcaaactgtagctgggtgtgggaggcagaggcaggtggatctccatgagctagagggcagccagctctacacagtgagatgctgtctaaaaaaagaaaaggaggggggtgagggggagagggagaagggattgacatgtgaaattataattttgtaaaattaaaaaaaaggttatatactctagccagagagatggttcagcagttaggagattatatgttaataattacatgtgctaataattgtatgtgcaaataaaattccccttgagagttatatagaaataaaaaaacctgcctcaataaaaaaagtaaaaggaattagagataacagagcaaagtaagataaaacaaaataacaaagagtaagaataacaaaaaaccccagtatcaaaacaacttatcaaatagcaacaaagagtaggaaaatgaaaagtcttagaaaagaattaaatagaacttcaagaaatgaagtcacagggatttaaaaacaaaacaaaacaaaacaaaacaaaaaaaccctcagttgacaggttaagctagactagataactaatgacaatggctgatcattgcccagagcggaaaactgggatgattcccctactgaacagatttagcgtcctccactgtggcagaactgcagaacatttacacaaagaaaaatcctcaacctgttgttaagacttttgggaccagatgaatacagaataactgttctaattcgtttcagccccagcaatcttccctcgaagagtctagtcctctagacagagagtacggacagagagcatgtccaggggttgggacagggtgaactaaaagagcagagaatctcactgcaccaaaatttagttctcttgttagttattacaggtgagatgaggaagggcaaagagctgtgtgtgtgtgtgtgtgtgtgtgtgtgtgtgtgtgtgtgtgtgtgtgtgtgtgtgtgtatgagtgtgtatgagtgtgtgtgcacgtgagtgcaaaggcccaaagaggccagagatgttggctatccctggagctggagttgcaggcagttgtgagccacttaatgtgggtgctgggatccaaattcaggtttcttggaaaaagaacagtacacacatttaactactgaaccagctttctagccccaccccccaatcacttagtatttatacttttttaaattttatttttattttatgtgtgtgaatgttttgccttcatgggtccatgcagatcagaagaagttatcagagctcctgggactgtatttaaggatggtggtaagccacacatgggtgctgggaactgaacataagaactctacaaaagcaacaagttcttttaagctatatctccacccccaatatttataatctttaatttgtgtttgtatgtgtgatatatgtgaacatatatatgcaggtgcatgccagaggaagacatcaggaattttctgagacagggtctcttactgaacctggaactaggctggtggctagcaaaccacagccatcctcctgtctctgttccacacctatgttggagtcacaggtgcatgcacagcaacgtctggctttttatgggtaccagggatttgaacttaagtcctgaagcttgcacaacactcactcttacccactgagctatctccctggccccaagtcttagcaggaaggagaacagtcagataagtgagagaaaatatggaaaatactcctgtgatcatgatgttctagtgagttggggagaagaggagacaagtgtggcatttgacctcttaggaaaaaacagagagaagactttgttctcacttggcagccatctgcagagtgcctggaggccgggagtgctgactgctgcatgccaggctgccaggctttctggctgggtctgatcagctacagctgagtcagaagccactgccctggggcaggagaagcaactacagactcaggcagggccatgtctacagaactgtcttcacaggaagggtggcttggggtcaccttggagctctgggttatccaccagcctcctgagaagctgaggagatagagctcactgaaacacaggcccaagagggggccacacctgacttcctgtggagtcacatctgcccactgccaactttggaggccttcaactgtaatgaattttaaatgaaaagatacagtgaaaaagtccttctaaataattatccaaatatttttctagccttttgctacaaaaatatctagtatttagcagggcatgatggcacacatctttaaccccagcactccagagccagaggcaggatgatctctctaattttgaggatagctgctcaacaaagggagttccaggccagtcaagagtatatagtaagacagtgttggaaggaagggagagagagagggagggaaaaagcagagagagggggagagaggaaaggagggagggagggagggcaaaacaaaagcaaataaacaaactattatgcagtaaagaaaatgtaccttgtatataatgatagaactgttttcaaaaaggaaacccaacattaatagatgtgatctgtcatatacacatcgtgtatcatatacgtatatgtatatcatatacggctatttccaaacatctgagcttcattgcaggaagaagtgtctctagatacagcaaagttgggcatttctccagaaggcttatgataaaggcagtatctctaatttcacccaacagcagcattccagtgggttttcactaagtttggcagactaacccttagcttcctttctccccacctgccttgcaagacgattcctgcactcagacactgcaccgagggtctggatgtaaaggcgactgatacatacacttctctcttgtaagtgaagtggcatcgtactcagcattcttttagggccactggagtcctaggtaccggtctgtattgcagggatcacttggctctgcccaaagagccattttctgtctagggtgaaccagctgctcttgaaaccagctgcacagaaatcagtagctcacatgaggctggcctcgcatttaggtttcttttcttttcttttcttttcttttcttttcttttttttttttggttttttgagacaggtttctctgtgtggctttggagcctgtcctggaactcactttgtagactaggctggctttgaactcacagagatctgcctgcctccacctccggagtgatgggattaaaggtgtgcgccaccaacacccggcttagttttaggtttctaaagtaagtcactgtacaatttgcagaaccacattattaatgtggttaataatactattatatgcaaataataatactgttaatgcaaacagctttgatgtaatctcagcagtcactaccagcacagacagaataggaatggctgacatccagaagaccttctgccactcatctctgctgccaactggctgtgtgtgtggcattttgtctcccatctgctaacctcccaagcctcatgtgtaaagtgaagaagatgatacctgtcttacctgtcttaggggacagggcaacagcaaccatgaagcacccggcacatgaagtgttagttccttagtggcagtgcaagcactgttgctctactgccctggtctcaagcgtgtgtgtgagtgtgtgtgtgtgtgtgtgtgtgtgtgtgtgtgtgagtgtgtgtgtgcgtgtgaaacatttggcagggttcttaaccagagtctgtgatccagtagttctgagtggtacctgggatactttttaatttgtttttgcagtggtgggaatggcatccgccgcctcatgcacactgggcaaacactccgttgctgagtagggcccccacgctgtcttgccctagtgttcaccaccctcttcttaccgcattatgaactccttgaagcataacctcagcttgttgtgatgtcgatagagctttgggtcagctggaatctcagccaagaacacttgggctacctccagcggtccctgacggagaaagtgaaacatgatatagatactggaatgaaaattaaattatttgggagacagagaatgttgggagggctccttagtttgaacacttaattttgtagcttgtttcatgaaaacaaaaagcccagggaggtcttgaatttctcaggaaattgattcctgagcaggactcagttttaagaggataccgaatagtcagtcaaagcacttcttcacaatcaaatactaaccctacagctttcccttgctgaagtactgtgaggggctcctctaacgcaagaactacctctatctgttcaatcacatttgtttatctggtatatctggtggaagaaaccattttgtgtaaaccctggcttgagccggaataatgcacaggccctctgtggcctatggttgtgagaataaaagtcttctgttttcttcataggattgggactcacaaaagcaaaggtttcctaacatttttctaatcttggattacactagtctttctcctgtctgatgcctctgatcccttggtgttgaggggacttagaacttctgcaggggatcttcagatggagaaggtgctggctggatagaacaatggttggtgagatttgagtgtgccagtgtgaggaaccaacatcaaggagcccactagacaaaaggtagtaactaggctgttagtacctagcccatcagagacaggcttggtgccatgcttaactcatgtgtaatggttctcataggaataagaaacaccaacccttttagttggcccgagaacccagtcccaggtcaatcctggttggcaaggtcctcgctatgttgggtatacctggtagctaaccaaggaaagagatggtttgagtcttttcttcttcatatacacattcttagatgagtcccaagccctgcatatagcactacctatgctggacacgagtcagctctcttcagcaggactccagctctgggtcacaccgccagatctggtcccaaattggagactctgagaaaatgaatggcattccttaaacacagtccaatccttttgaggatttctttgggaagactgaatgtgactgactcatgaagtcctaaggatggtgtagacctcacgaacagaagaataagcaccggccgagctgcattagtgaactccactcacctggtttacagtggctcctacagagccttgcagtaccatctgcagcatcttggcatcagggggctcctggtgagtggccaccgctaactgcagggtcttcttcttcatatcttcaatggcaacttcaatcggagtcaaaacgaactgaacagaagacgatagtatagtgaggtcatgtgtgtctccctcacagtccctggcaaacctggaatgctgacaggtgggctgcctggatttgaagaagcagctaaggaaagacttctggggtacttggaataatctgaacaggtgacgcagagagatgagcttgacatttcttgagcacctacatgttcagtatcatacatgtgtttctgctttaaacaacatcctgtccttcacactctatagtgttgggagccagatctcagggctgggcatgagatcctaggccattcttggcctagttgtatacacatagttgtatattaacctttacataggagctccttagaacctcagctcaagaaaaagacccagtcctccactcacaggctcagtcacctaggcaacccttcctggacgtcttactcataaactctttaccctgtcaaacatcctctttgtggcttcctaatatcctgcctacactaacacctggctcacaaacaacccattcaacccctccccatatcctgctctgccgactatataagctagcctgagaaaaaaataaagtttgccacttgatcagaatcccatcttgtggttgttctttctgcgtctcttgtccccattccctatccctgactctcttgccccaggttgatgtcctgcaggacaggacactatagaaaagggggaatttataagatcaagtaagtaacacaaaatgtattaagtattaaggtacaaattcgatcacaattatgcctgtatccaaagcccatgttctttctatatggttaggtttctttttctattattcaaagagttacaagggggaaagcacagcagccaagattttctttcccatcctcacataggattttggcatcatctgtgccctttccacctcagcctggtggtgacacctggcaaaaaggattttcttcaggatccatctagttgataagttcttctgctggtttggagtaggggccttcctgaatgtgatgggtcaaatcctgtctcccccaaatccacatgctaaagtcctaacctccaggagctcagaaggtaaccttatttgtaggtaataaagttaaagtcactttattagggtggacctaatttatataattggtgtctttaagaggtgaggaagaaaggacacagtatgtatataagactagtgctatgaattgacactaagggaagatgtcctttgacaagcctaaaggacaggcctgggacagattcccccctcagccttcataaggaaacaaccagctgaccccctgaatttgaacttgcctgcctctagaactatcgagacaatcatttctgctgtttgagccatccagtcagtggcacactgttacccaagcaatagaaaccacagagtagttctagggaattgcatatggctataagaatacttttgcaatgtatctttgtattgtgcctagaatatcttactgttcaaaagtccaaagcagtaagaaccacactggatgtctcagaaacctcctatcaacagtttcacagaggctctaccctctgtgaaagttcctcctggaggaagctagtcactcaatggtggtctagatggctccgctccagccagttcagcccatgcagttcctgccccacaactggatggttgcaagtcctctacttgctcactgacttgattaggcctgttacacttgttattttaatgaataacatataaactgacggactaagggtgtggaaaggaagggttgtttctatgaagatcaagcggaatgcttgggcaagatgtcatgaaagtgagttgctataaaaattcctgtcatattaggtacacacaagacaactgtaaaaggctttgggctaggctcatcaagatccagaagccaccctctcacacatcagttaacaagcgtttgtaaggcttcattctgcatcacggaaagcaaactaaaaactgggtatagtttatgtaagaaaaacaatgctgttgttaccagttaagccaccaagtagaggaggctacggtccactataaggaggtggtatgagaattaggatgtagggatttcaaggaaaaatgatatgtctgtgatggattctattaaaatggcttaaggtcttccaaaatatataaggtctttcttgccaacattttttttttttattaataagttggagccaaatactttgggcacagctacaggtagaatgtggagtcagaagtcaggtttctatgcctgcctcatctatgccctgcccacatagagcaccagctcagggggctgcttgtctgtggttccctttccagtgatttagaccacaacaatgcctgaaacacttacaagcctttaggtacattttttttttcaaacagaaggctggggtgtagtatgcagtgttcacctagcaagcatgaggtcctgaatttagtatctaacactagagaaaaatactgcacaaaatatttaaaatttaaatatagtcattctcctctccatgggaagttggttcagggaaccactgtctccaaccacactgaaatctgagaatgctcagggttttgaacatgaagtataccctaaacatcacgtctggtttccaatagaaacctcctacattaccagtgagtgaatctcttgatgaattgatgacagggggcaagatctgaagtatagaggataggcttgtctgggtgatgtaggtccatgggagcatccctttggggttgttatttttccttggtccctctctgaagcctcactgtctacttcctggtcactaggatgtgtactgaacggctcagccatgccttcttcaccatgatgtatgggactttgagaactgtgagttacagcaaaatttcccctaagttgtttccaccaggcatttggtcacagcagtggtgaacactccacaatggaatagcaaacccttcacagccaatgggctgcaagggctgtgtagacagttgctttaccatattctttaagaggaaactgacaaggataaaagttcatacaaattttttatagatataaactttcccttcaaaatgctaattcatggttggttgactccatggatatgaaacctgagaatatgaagagctaatgtatagatctcttatataaatttataattaaaatggaaagagatgacaccgtaattaaatatgtaaccatgctatagaaagagtaatggctatattatatataaatatataaaacatacataatatatcctataaatataccatataatttgttaatatataaaaatatgctatatactatatattatatttaagtcagttttatatatttaaatatattatattttatatgtattatataaaatataaaatatttaaatatatagtatatattatatgtatatatagtattacatatagtatatacaaaatataaaactatgctatattaaagagttaaatatttaatatgaagtactgttttgttttggtttggtttggtttttcaagacagggtttctctgtgtagctttggagcctatcctggcacttgctctggagaccagggtggcctcgaactcacagagatctgtctgcctctgtctcccgagtgttgggattaaaggtgtgcgccaccaacgcctggccaagggtgaagtactgttttgaaaggtgtaactaattgaataggatttcttggccccatgatagtgaaggaaagctttcaagggcatctttgcacatgttagatagatgccctacctaccactgagctatatctccagtccttggtttattcagacaagatcttgctacacagtttaggttgccttagacttgctctgcaatccaggatgctatctagctcaagtggctcctgcctcagcctctgtagtattgggattataaacatgcacttgtaggcttggcacatgtttgttgggtctcactacacagtcctggtaggcttggaacttgttatgtcgataaggctggccttgacctcacagccacccacctgcccctgtctcctccttcagaggtggctactccccccagggtgcattacctcctccttctggatgacttggatcctggtcttgatgtaggggaaggcatgcatggtggtgagcactgtgttcctgcgatactgttcgtgcagctctccccgaggccgcccctccagggtgaagggggtggtgtacatgaaccttcgaaggttgaaattcttctcgaagtaggtcaccctgtctttcatctcatactcatcaaagtagggctccacaaaagtgatctgtatgtaggcctggaggaagaggtgagaagaagggaaggatgagccattcagccaaggagatccatgcagccttggaagggcatgctgggacagagcacaacactcctttccaatctggaaaaccaccagtgcctcaggccagaattcagaatctgctctttctcctctctaccccaggcaaagaaaggcccttgagactatggaagggagcctgccatgttcaaggaagaatgaggtctagcagctgccccctctagcacagcaaaggaaggcaaatcttccttactgagttgccatgacgaggacctgctaattaggtagtgcagatgcttacacggaaaacacacacacacacacacacacacacacacacacacacacacacacacacacacacacacagagtaccacgtgttttctaggatggagcagctggaatgttcaaaagatcaccggggaatgcaaaaatgcatggctactctataagccaaaactccttatgcagctaaatgacacccacccaagagcccaactccatgtatgtccacaagtgtttgtgtgaagcttttctggattggatgcactcattgccttcttgaatgagagcagctgtgaccacacacatgcaggaagatggtagcctagtgacaccccttcctccctatatccactaccccccctttcctactctcctccccatagatgaagctggaaacagctgctgagaggagtttctctggaggagtagctgcccataaactgcatagaggatttcctggtggtacagctgactctgagtacccacgctcctctaaatgacaccaataaacgcattgattcaccaagttagacttgaacagacccctttcttggatctcttgttgccttcactatatgaggtgaacagaaatagacatgccatgtgacatcaagaaaatgaaagtaataatcagcccaaattagagccacgttgttgataatagacaatgaggaactgcccaaatgtccctctggtggagataataagcaagtgtgatacatcaccacgacaaacactgtctgcatgaactagttcaacacggtgaatcttagaggggcatgctgagcaaaggaagtcagcttcaaaggaatgcacgctcccacaagtccatgctccagacaggcaaaccgacacagatttgagcaatacagcttggtgaccactaagggctaaaaatagagagtggtgacaaaagagcttgagaaacatttcagagtgacaggatggttttgtaccttgactgtcaaggtaatggttatgtgtgtgtcaaaatgcattaaaacacacaccagccaggaagtgatgacccaagcctttaatcccagcactaagaaagcagaggcaggtggatcaaggatctctgtgagttcaaggctagccctagtctacagagctagttccagaacagccaggctacacagaaaaacccctgtctcggaaaaaccaaaaccaaaaccaaaaaaccaaacaaaaaaacaacacactagtgacactagtgaaactctctctctctctctctctctctctctctctctctctctctctctcccctctctctctctcaaagcataaagaggagttctttaaaaacataaagaagaagaatggaagtgagcagtgaattcaggctgagacacccacccagagaggaggaaggtggacaactgacctcacactgtaaataaatcatgctttagaataatgaaatttgggtgtgactctgggttaggattctcattccaagctcaaaatctaccctgggaattttaaaagaggggaaaggccctgccattgggaaggtcactcgggctgtgttcagatcactgtgggcacacagccagtcctatcttccaaggactccaaacattccttcaatgcttaccataatgattgctttcaggcctcagctagggaacgtctcttaaatgagccagtgttctgacaaatgtagaaaaatttgtatttggccaatctctcccaatccgtatcatctttgtgcaatcctgaagacagaactcagggaccttcatggagagggcataggaaccgcccttcctcctgacttcacactctgtgtatccatttttgtacagctgcaatcagaactatggtactgttttcagtccttgagctcatcctggtgaattatgtaacccaagggtgtcatgagaactcctaaacttgtagccagctagaagtataggtgacatgagacatatgggagcctcacttgaggctcatgtttgaaacaagggcagtcttgaactggtaaagtctcatgctacatgtgagctgtcgacatcagaattgcacagcactgtcaggtggaatggacacacctcggtgtggacgtgagagaaacaagcttccagcctcgatccttcctccactactgtagcagtcctgcacatgactagaagaaatgcctgaaacttaaagaatgatgccactaaacactgtctgccagaagctgctgtatgtttttagacgcacgcgcgcacacacacacacacacacacacacacacacacacacacacacacactatgtttatgtgtttgtatatgtcacagttgtgcatgcatccttggaggtcggaagagggagttggatgcctcgcagcaggagtcactaactgttgcgagcctcctgatgtcgggtgcagggaaccaatctgattcctttggaaaagcaggaagtgctcttatctgctggaccatctctccaggccccagaagttggcatattttaagacatattttaagttgaaagtttaaacattttataggaatgcactaatgagctggagtgattaagaggaatgtgggctggatatcagacctcttgggaagcagtggctctgccatcagcatcatcttagaaagttgttcaactttcccaaggctggattttttaatctataaaatagaaacaaccaaacctattcctaagggctgctggaggatggaaggaaatgatttaaacatacagctgtggtgtttaataaataacagctggagacggagtttctggggctaaggggctgtgggaccaggtgggacagaaactccatctacaaacagctcctattatgattcttgttttttgaatatgctttttgccctattttgttttttaagacagggcttctctgtgtagccctggctatccaaagaactcattctatagaccacgatgggcttaaactcacagagatctgcctgcctctgcctcccaagtgctgaatttaaagcatgtaccccaccatcagctagatgaacactttatttttcatttttaaaaaattatttatttacatcctgaccataatctgtttttttaaaagacctgatcaatcagaaattgaaccctggagtggagggaatgcttatttgctggctggtgtgttggtacatgccctgcaaatcctaccactagggatgttgaggcaatagaatattgaattcaaggccagcctgagctacatagcaagaacgtgtgtcaaaaaatctcaacgggatgaggagatggtttagtgggtaaagggcttgctgtataagcataagaacctgatttcaggtccccagcacctacacaaaagccaagtgaggcactgcatggcacatgtgtattcccagtgctgggggtgggggaaggtggtagacacaggtagatcctggcattcaaaggccaaatagggaactccaggtaggaaaaataaggtggtacatggtagacaaagacacctgatgctaacctctagcttccacatgtgggcatggatggtagagtgtatctgcacattcacagataccccactcacacatctctctctctctctctctctctctctctctctctctctctctctgtgtgtgtgtgtgtgtgtgtgtgtgtgtgtgtgtgtgtgcagacatacccccaaacaaaacaaaacaaaacatgtttgcatttgaaggactgggagagcccagacacagaaggtcattttacactttcagggtagagtctggtagttgttttctccataccttgttaggatccaacttggttttatccacaggagtggagtcctttatcacttccacaaactctgcaccaaaacactggccataaaatccctaggacagagaagccaagggtatgtaaattcatttggaaagtatgcatctccttggaaccagtacaaggcagaatctgttgattattgatggtccctctgagctgagaagcaaccttaagcacttcctgagacagaaataaaagtataagatgttccacacactcaagtacctaagcttccccacaatacagatgcatggtctcaaattcagccatcatcatcagatttctggaggcagctccatgggtaggcactatttacttctcacattttgtatcctggaaatttggaggttgccaggcttcccataatgtggcaagccacagtgttcaaggagacggagacacacatttctaattttaagcagaggacacaatattagggagttaagagcctgggccaatggctagttttccttgtcatgagatgaatgactttgggcaactgcccagcctgactaggccacagcttcttggagttgagtcctctggccttattcatcagtgagttttgaagctttacagtctaagaggagacaaaatcaaaggaagaacatggcagaataaccggggaacctttggttaaatgtcaactcttctcaggaccctggtctctcagccccgaagagagctcttatttgttcctctcaatttctgcttctgtttttctgctgtttgctctgtcattgagaacctgctactcttttctgttccattgtgtagctgccaggttggagctggggctggctatagccactttgcaattgctttatatctgagtagaaggtgttatttagagacacttaagggcagcctcaccattgagagtgaagggaatgatttggttagattgttttgaaatcaagatgaaaacctccatgtcagaaagcaccatgaccactgccaactggtatatattggtaatgagtggaaggcactataagtaagtgtggatgctgactggatttgatacagtcttgcaaaaatcactatccaggatttaaatttgagactttgtaaaaacaaacataggatcaagagaaaaatgtgcaactcctatggtactcacaatcctgcctactaccttcatactacaaatgcaatgtagaaatttatatagaggtcagcaatgagcacattaaaaaaaaaaaaagacattctaccttgtttttagggaatgtacaaggtcaagcacacagcgccattttctcacctctagtctatgtgagatctctgggagctttgtaattgcaggctccttgtacacaaattcctgctcatccaaatccccaaatttggatccgtagaaaccaactcggaagtaagttccaaacatcctcttatggtcctgttacagaggaaaggggaggtctccttcagttgtgtcattactggtgatccacttgactaaaaggattggttattgggcagcaaacattttattcccacaactgacatgaagaagaacccctctgttaaatagatttaatatttacacaataaaccccagcaatgattacaaaagaaatcccatgaaaaaactcctggggcttcatttaactgaattttaaaaattctcacattccctagctataaagcaacccagcctgccacactgtattcccagactttccttgtttgattcagagttacagcttccttgagctcaagggaaatctgtcgtcagggagatctctagacaccagctaacagacccataggccagacccatccccagctaccttgttgatgatgttgtcgaaggccttctgcagtttgtcgtgagtagaggtcagcttccggaaatctctatgtgcttccaggatgggaatgaccagcttgtagacttcattaactgtctcatacaagcctccctgggaaagaggagattatttaatgcactggaagtgtaagaggaagaaccagaattaattacacaaacaacatttgggagagcatcatagcactttttggaatcctccacaactgtctgggcatctttggagaccaggcaccttgctaagtggtgccaaccagggaggtggctttcctcaaactgaaaacaggggaggagatgtcacaggtaataaggggctcctagaggtggcttgtggcttctgagctgatcacaggttctcctctagccaattgcaggacctcaaggggttctaatgggattctaaccaattgattttctaggatttcaggaaactaagggtgtgtgtgtgtgtgtgtgtgtgtgtgtgtgtgtgtgtgtgtgtgtgtgaatatgaacaaagtacaatgatatatgcatatgggaaaatgtaataaggaagctagttttgtacaataaccaaaaatcaattaaaaaactgttttctgatttctaaaatagaaaacaaagacaggaaaataaaggcagtgaacacaataaacacagaaaatctaaggaggaagtttgtaagtgaagagtagaaaacaaaaaataataatacaggaaaacagaatggggtcagctaaagaaagtattaaatttactgggcttcactatggggagagagggcaatgattaaaatggagacatatgagtggctttctacctcccactgaactgcagtgggtttcctatgctttttctcttactgagagtcagacccagatcagggtaccgagggatggttctgtggtgtttgctgccccgtctctctgagctgccttggtctatacatgtctgaagaccagttgagtgtcccagggaagatgtcatggatccctgcttgctcttcagtggctcctgccctatcttcttctgtgagtgggaaaaggagggcgtaagaatatgcctcatctctgattgtgtaaccctgggcaagctgcttcacctctctgtggcttagctgccacactattaaatggaaataatactgtgaaacggctccgggccaatgagcatgccttggaaataggagaatgcccacgatgaaatctcctcccttggagagctgatgcaatctgtgaacatcaaagtcatcgctggtctagccaggagcatccagccaggcccagtcctattctgcacgccccggtaagtgtgaggaaaggctgaaggagccctgtaggcactgaccgtgctgaagagctctgcagcctgctccaggaggcccaccaggccactctccgtgaagtaccgaccagagcacactccgtcctcatcaggtgacagggtgtcgtcagagactgcagactcctccagcacattggaggaaatattctgtaagagaacccatcatgagcccaggatcaggagactgacaaataagggaccacaaaatccagatagatagtaggataaagaagccacgctgtatgaccttcactgggtggtgattacagtgagtttgcaattccatccacatgagctgctggtggctattcatttggaaggccactgagcaaacttgtcatcaaaccccacaatttttaaccatggaggaactttctagaatggacactttccttaatgtaacaacagtttggctgaaacaacctcactgttagtgaaataaccctaagggacatataagggccttggattttaaaaggccaaggccagagagcagggaatggagccccattttgccagctgctactcctgcttgtcttggctttgagataaataaccatattaaaacatatgaaagtaatggatgaggacgtcttccatcttctttacagaaacttttttttttttttttttttttgtctttttgagacagggtttctctgtgtagctttggagcctatcctggcatacagaagcttttttattttattttttattttgtagacagggtttctctgtgtaaacttgactgcccggaattcattctgtacatcaggctggactcaaactcacagagatacatctgcctctgtttcccgagtgctgggattaaaggcgtgcaccaccaccgcctgcccagaagctttggtagagctcagaagaagttgcccaccctcacacacattttgttgctgtgtgttttttcctttatataaactatagaccttagagcctcttaccagggaatgcaatgtctgtggatgggttggtgcaaatgagaacccagggcacaacatttccagaagcactcgtgttttagggtcatgggattgctgtcttgggacttctttattttgagaatgagttccttttcacattttatgttgcatgtacaccatttgcctcatccaggctctgaccctggcagtgacttccatacttctgataggccaagtgccattcctggctttcagctatggaagaagtgagtatgatgtgtagaacaaatgggaaaccttccctgtgtaggaactgcaaacagcacacaggacactccttcttcctgctgtgcacgtagcaggcataactcaacagtgattactcttttccctggaggttggctatacctcaaaactcccagcataatgttccagtcagctactaccaattgctcagatgcgtttttttgttttttaaataaacgctatctgccttctgactcagctatcaaaatcaaggtaatcacctttaggaattcataaagaagtagttgtcacagcccatgcattcacagttataatggaatacgtttatgaacacaaacagagtttttggaagtcctctgtgaccaatttttcttccaaatctgaattattacgattttagctgaaagaacctagtcacttaggccagcagcactaacagaactggatgatttttctgcatgtagagggataggtctgagctaggcagttcaatagctgttaagtcactggggaggggatatctggcagacattcctggcttcagagcgagggaggtaaaagtaaaggtggtatttgagaacacatccacatctatgtttgtgagatcagtttgcctgcactccagggatagaattccaatgatctcagtggcttggactgcagtgaattccaagttatttcccctgaacattttctccactctactcatctctcccaaaggcttaactttattggagtacagtgagattaaaaactagagcacacaaagaatatgtaagaaatcagcagtagagccaggcatggtaccacatgcctaaaatcccagcacttgtgaggcggagacagggatctctcttaattaaagacaagtgagtccctgtcaaagaaagtaagagggaaagtgagggaaggagggaggatgaacagatggaaggacggacagacagaaggaaggaaagacagatagaagggagggaggaaaggaggaagggaaggaaggagggagggagaagtgattattgctaacattgtctgaattcctccattcttctgtcacattatggtatcctcattttcttctctctgttttgtttttagagacagtttctctgtataacagccctggctgtcctggaacttgttttgtagagactggcctgcctctgactcctgagtgctagaattaaagacgttcgcctccaccactgcctggccttcattttgttttagaaaaaacactggtgatgttcattgtgacctgtgactctggcacagataatcaggccattatgattagcttgggaacaaacacatgacctggtcagtaagatgccctaagactttctttgcaacttacagaagggggatttctcttttctcccggtcttgaatcttactatggcatcatcagtgtggagattctgactatgaagaatgatgcccacaccacagaaggctaggataagaggtagtgacaacacttaggtcataagagtttgggtctctagactatttatcattaagtattacaaaataaggaacagaacagtttgtgtttctggctataatataaagttcatgtggacaagataaatattcaatgaatattccataaaagaaggaatggctgggaggtggtggcgcacgcctttagtcccaatacttgggaggcagtggcagatctctgtgcgttcaagaccagtctggtatacaagagctagttccaggacaggctccaaagacacagagaaaccctgtctcgaacttccccctccccaccccccccaaaaaggaatgaatagctgggcctggtaacacatgcctttaatccaataactataaggtatagggcaggcagatctctgagagtttaaggctatcctggtctatgtacctagccattgtttcaaataacaataacaccactataaaaaacccaaaagaagcaatgtataaagatagatgaaaaggtatactcccatgtaagggtaatgtaggcttccccaggggttttggaataacaattttatctcaacttggaatatatcagaataagaaagtcaatgatttataagtaaaataaggataaattaagctttttaaacataaaagtaaaaatgaaattcaattacttttaagcattaaatagtaaataaaaagcagcaactgggagaaggcataagcaatagcttagtagatgaagtgagaagggatgacacagttcaacatgaagggacaagcctaagggccttgcaggagctggaagggccgcactgcaacactgaggtaacaggcaagtggacaaaatgagctgcttaaaagaagcagacacactgaaaacatttttaaaaactttcttattcacttttatgtatgaggataaactgggttttataacagacatttttgaattgagactaaaatcatctgttgagaatgaaaccaaagagttagctatttttgttactgctaaaacccagcttgcagatgaacaggcctccagaaaccagacgctccctgctccaccagcaacagtttcggtgtgttgttctctaagcctgggaaagctacttagaatcatcttttctttctcctttacaaagcatctcaaaactgtgttgaagaacaatcatgagaacaaagcccttcatacaatcagctatggaagttcaaatgagaacaatacaaatgcttgtttccaactttagtctggctggagacggtccatgactgtagtctggtgtctgtacgctgcagggacagtcatgtctacagactctatcttgttaaaagaaaccactcttaatgttcttccaattgggacttttctgccctctaagtagcatattaaactacacagtgacaacagcccaagtggctgctgggcagccccatctgagctttgaggtctggcccagtttactcttgttggctgtgggtaactttcgggttatccccaggaagcatccatttagccatttctttcccatctcaggtcaatttgattctttcttaattttggacaagagtggaatcccacagagttgggtaaaagaattgagggactggggagtgagggaatcattacaccagtcttccctccttgccagtagacaagccaaatacaaatgttccagaaagaatttaaatgatctttaaaaaaaaattgctgtcttgtttcttacatctgtgaaatggaaatctacctgcttcacaggattatggggatggccacatgtctagaatgtctgagctctctcccaaagctcttattgcctctaggtattatcacggcaacaaatgtgttttaaaagatggtgatgccattagatgaggtaattataacactttaacacagtggttttcaactatggcaacatagacaactaggaccagatatactaatggtggaaacatcttggtttctccctttgtaacatccctaaccatctctggtgactgtggaagctctcccttgggggaggacccagtcaaccacggatggacaccaatctaacacaagctgtgaaagctgcacctgtcctacctgaaaactgacgctgcccacaggcaggtagctgtggtcctccagcatgctcaggtactcggccaccaaggcggctgcgtgaaccaggcacatggcagcctctgtgaagcacttcttcttagtgtgtttctctgccatgttctggagccaggtcagacgcaggtcaggagacgcttggtagctcttggcgatcctgaagacagattgagaaagtttcgtgtgcagcctttccatggcatcactcttacagggatggcgacctttatttccccactaatatttctgtttacaatttcagaaaataagagaaaaggtaaaacattcatccaactctaggtgaccagggtgctctggatgccaagaaagaacactcagtagaagtcttatgaggagaaaaatctcataaaataatgtccttttttatggagctcaagcaatttccttccttttctttcaaagttgtaacagaggacacagtactattcctcttacgatggatcagagctatttgcctttgtaagtaatttctcctaaaactactggaccagaggacaaagtgtttaaactacacagtaaagtgtgacttctaaactgcttgtttatgaattgccacagaagcatgtgggaaacaattcatacaacagccaataattcttttctctcattctagacagaagatagtatttaaaatgaacactgtattttatgttagggcaatctttctggagatttatgagtgaagcaactctagttttccattatatatagtgttcatatatttttcggatgctacccctcaactattctacccaggttgcctatgataatgacattagaaagtgcaccactgggacttgagagatggctcactggtcaagagcactgacagttcttttagaggtcctgggttcgattcccaacacccacatggcagctcataaccatctataccatcagccccagggcatttgatgccctcttctggccttcctgggcactaggcacatacatggtgcataaacaaaacatccgtataaataaaataaacatttaataataaaagaaaaagatggaaccccactgagacacatattcagactcgaaaacaataatgctctcctccctcccttccttccttccatccgtcttttcttccttctccaggtgtgtgccaccatgcttgccaacaatgccctttctatctgctcaggagagtttacctgtacatgaggtccatgagcatctcagggtcttcctggaattccctcattttcactgtgtcatataaaatgctgttcagattgtaaagaagttcctccacctgaaaaaaaaaaaaaacagtgcaagctgtgaagagcatgaagtacaggggatccagcgaaaggctttgctcagagataggcagagatccaaggtggagagaattcaagaccatctttggaggtactttcatctgtgcaacccaaggtccataggtaatgtggcctggagatccatcaagcagccctgaccttaacactatctccctctccaacaccttgagtttcaagtttgaatgagtttcggttatttgtagactgcaaaggtacaaactctactctggaaggccaggttgtaagaacctaaccacagagtaggttaggggctaaagttaaaaggcaaagaaggctgcatctttcacttatggcatctttcacatgggcattgcaacaagacagaagagtagctgtcctcctgggttccttaggactaattgtggtgatatattgtttatgatctaataaagcttgcctgaagatcagagtgcaaagctagccacagccatagaggccgggaagtagcggcacacacctttaatcccagcactcaggagacagaggcagatgaatctctgtgactacaaagccaccctgggctacatgggagtgaatcagtttaacacacctttaatcccagcacaagggaggtggagacaggagtgatttggctgggcagagagagaaatataagacagaaggagacaggaatgcattgcagtctggtctgaggagcagtgcagtctgaagatgcaatcagaagacacgatcgccccttcagtctgagcattggtagaggtgagaactctctagtggctggttgctttgcttttctggccttcaggtaagctttattagatcataaacaaaatatcaccaggactaatgttgtttaccagctcttctaaattgggatccttcttgtctgtcttacacaaacattattatccattccatgatcagtatttcctttccctcttccctaaattctatcctaggaatttgactcctctccacccccacatttccagaccaccatttcttcatttatttatttaattttttgcagttgtgaggatcaaaccccgggctttgtgaatgtaggttctaccacaaaactatattcagcccctgtaccccctttcttaagtcttgtatagtatttgctatcacacagtacagtatcacttttcttctgttagctcttattgttagctcttatatgctttcccaatagactcttggtttcttgaagttgaggacagtggtatgtatattgcatttatcaagcccaagaacatgtaaatatagaacaggctataaatacctgtaaatcatatatatatatatgtatatatatacatatgtatatgtatatatatataattttatatgcaaaaccataaatgtgtatgcttataactgggtaatcccaaactcatgcataagacaagatatgttgatgggtctacctgggtgggaaaaggagttgtttgcatagctgtgtcctcttctgaataggccagaattgtcctcaaggaccttctcaggtgctcttcattgaagtctggtgctttgcctaccaaggatgctagagccatggttacctgcatctttactcttgcaaaattctgcatcagaaaagatgatgtgaacaagagacagtcagtgagtgactaaggggaggctccagggccagacacaaacagctcccaatgttcctttcactccagtcttaagcatttccttttctctcaataaatttgtgagctacactttgcacaagagtcacattgctgtttaaataggttgggtggattgcaagctcccataaatctgtcaggctcctttaaattttcattgcatttggctctgcaaggctgaaagattattataaagttggtcacaggacacatgctttgctgccaagagtctcttcttggaacttacaaagggcctggaaccttctaaggcagcactttttattttttccttcttccccaagacaggatttctctgtgtagcagtcctggctgtcctggaacttgttctgtagatcaggctggccttgaactcacatagatcagctaaggtagcacttttgagattttggattttgaagtaagcagtagcttcctgcatctccttttcttccatgactgtgaaaagcacacctacccatgggcccatggagcatgtcccacaggtttttaaacttctataacatatcatgaggaccagtgacaggggtattactcagtagtaaagcaagtgattagcattatggggtccttggttcaattcccagaattaacacaaaacagacaaaaataagacaaagcaaaacaaaatcctaaagaacccccatttcatctatgggtccatgtatttgctcctcccttgatctgtaaattcctttttgaggctagagatttttttcaaaaacagagtttagtataaacgattttttttgttttttttacatttcagttggtagctttattggaaggagtccttaaagatgcttattaacatggcagcaaacaaaaatcccaaacatgcttcataaatatgtacagactaaagcaaaggtttgctatgaaactgaaccccaaaagtgtctacatttcacttaaaattctggtccaatccaggcatgatggcacatgcctttaatctcagcactcgggaggcagaggcaggcagatctctgtgagttcaaggccagcccggtgtacagagcaagtgccagaataggctctaacgctacacagagaaaccctatctcgaaaaacaaaaacataaacaaaaaaatcaggtccagatgacaataatcatttacaattctcatccacaagccgccctggtaccatccacaactagtactgattcagactttagaacaggacacacttttctgaatctgcaacgcacttgcgtttgtcccgtgtgcgggaactttgcgactgctggaagcgtgcaccttccagtcctgccttcgctgtcaaatgctggtgctcacctgcacactccctggtgtctctctcacagggcagaagtgaaagctaccccaccaacgccccctctacctatgctccgcattcatgttctgtcccgatcctgggccacacagccggtttgtgcttacactggtggctccaaaactgaaacgcatgaggaggtagagggtggcgcaggcctggctccgtgtgacgtccatgctgctgctgcagtggtgcagcaccctctggcacaggtcagcacactgttccacctcctcctcgaacagcaagtctccaaactgcaagagacacagggtgcttgtgaggcatcgccgggtatttttgcaagctctgtggctgtctgttgcaacatgcaaatgtctgtttggacaagcaaagagcctgaagggttaatgtagtgctccataaacaaaatgggctacatgtgtcagaagatggaggtaagcaatgacgtccacttaattgtgagtcacacagctgagataagggctatgccattaacgtcaccgctagccaggcggcattcactggtgagtgagtcgcagcactgaaagacttacttgtgtttcatgggttccttggaaattattggtgactaagaaagagaaaattattataatagtggacagcagaattccacttcataaatttacaagctcctatgtagaaggcacccactaagatttcccacaatgacggaagataatcttaatacgctactaatcaaagacagttagttacagtgatggtcatttgaaatctttatagttaggccctcatttcaaggatgagagccaccgtttgtcacccccccccaacagctacttcgtgacagtcggtgtgcctactttcttaggaagcggtaacacttttactccatgccctccatgtagcttgatctatttacagaggaacttgaatctagataagaatctcacttttaattaagggtaagaaaacaagcatcccatgtgtaccttggcaatgagtgctcggagagtcgcaaagcagtgagtcaggtaggtggtgctctgatcacagctcagagaattcaccaggactcgaaggacacctcccagcaggctgtctttacagtccagggcggagcttgcctggggggcgggtgtggaagaacagcatcattgagtaaggctgaaggccagagaggctgccctgattatagacaactggtataccttcttagttgaaagtgttctgtgagccactgagtatgtcattcattaacaaccacgagagcttaagccctctttcccaataacccctttccaaaattaactgacttgggatatccctttgggatattaaacagagttctaaggttcatctccctccagcctgggttatagcttttggaatgttctttctttgtaggtatgattttctatcagtgtttcaaaaacatttgggagcttcaagtacaacagggctgctcggtggcagttgtgtcttctaaattggcagcccatttgtcagctacagaaggactaataaggataataagtattttctatagtgcaactttttaaggaaactgcaaattactttgagacttggtatcaggtacaatgctctcagaaatagcttgtacaaagatgctaaacatttaggataccaaagttaggaaactttctaaagatacctgagtcatccttggatgctcaaatccctcctataaaaggggggtagtatttgtatatataacccacaattctctcatgtacttcaaatcatcccttgattactttcggacctaatacaacataaaaacaccatgtcaacagttgctattctgtattgtttagggaacaatgatgggaaactaaaatctgtatgcatatacagatatatttttcagtatggatctatttttactcctaaatattcccccatcaatggttgatcaagcttcaggatgtggaaccactgcaatggaaggctggcttatgctttcctaaagtagggatggcaaattcacaggactgtcgttcagcaatctgagtatggaacacatcatttgtcacatttagtaccttttttttttttttttttttaacctagtgcagacataatgttagagtggcaacgaaggccaattgggagaaagcttctagtcaagagaacattatctctggcttggtgaagacccaatattccagttgtgctggtaaatcaaagagaccacccctagggtgacaagctcactttaagccacgttaaggagttgggcagagtaattagtcctttaaggagacagtgtacttttcctccccagaatccctacttccagcacagtggcttcctgggccacagacatccgtctttctccttttgtaaattattcagaaaagtgtaatttctccttaatttttctatcccttttctaggcatactttccctaacatggggtcttcccagcattctgcactcccttccctcccatgtgactgcttgcttggcatgtatatgacctctacagcaatttaaatggcatagctttctttccttttctccttcaggctccccttcccaacagctgctaagatttgcaacttgacaactttggggatttttctttaaaacactaataaaattgtccttcactttctactttagtccattcttgagtccttttattaaggagactaagaaccccaggcaggactccaatccctctatgtcatcaacaactcctttcctaaccaactggaatttacctacgaggagaaacttagttaccatccttgttgcagtgtccagctaagagctcactgtctaccttctaagtctagcacgtacttggactagcttaaccttgagagtcagctcctcaaatgcccaactcttcccaagggggtagtagaatgtcagagaagccagaagatacctggtatctctggaatctgcaaggtaggtaaacttgcccactataattttaaaaaggcatgctgaaatcatattcacatctttctcaattttgaatgaaggattccctatgcaattccgagggacgcacccgagagccagccagatgggtgcgcattgccctcacctggatgatgttttcctgcatatccagtgtgattaaatttgcttctgttgccagattgccactgatcaaggcttcttgatctaactctgcctttgttctaagaaacaaaaggaggtcaaattaaagcacaatctggcttggccaggttccagcaatgacaaccaatgtaccacgtcacaaaggattctttagaaccatcaaccatgaattaacacaaagcggccggcctcgatgtaactaaggactgcaagtgtttcccggggttcacgcctggttgggaagatggttgggtgaagtctccaggtcattcatatccttactgttattaataatgatgataattaagaaaatagcaaaataggtagagaagtaattattggttgctactaacaattaggtgagcctatcagatagctgtttaaagccccagggactcgtctgccattcatgcatgagtactatctgagtgggggtagggcggggctgcaacacgctgagagatgggctgtatcttgaacttggtgaacactgggaaacagtgatgctaccgtggagagggagattcagttctttactactcagagtctacctgagaaggttgcttagctgagtgtagaactggctgtccttctccagtgggaagcaaggctcacatcccatgggcagggcatcaaacattctgccagaggttcctggactagaaactaccaggaataggaaataggaaatcactggcactgtttctttttcaggtttaattgtaaggagctggttggtgtgttccgtgtactaatccctccatcctcacaaaccaagtgaagctgggaagggagaaagtggtctcttcttccatagctttgccttcaatgggtcagtttcccatagtcaacaagagtcagaaaacattccgtgagaaactgaagaacagattccagaaataaacaagtccctggctctgacttgtgtgcagttctgagtggcatgctgtcacatgccatcccgtcaggtgatcattgctttgcccagcgtatccacactgtgcatgctacctacatgttatttacttagttactgtcttcgttaccatattgactgacacaatatcacactgacacagagaaggacttggtgccattcagagttttgggtatctactggagtgtattgcctccagataaaagggtctaccatccaatttattttaccatccaaatttacttttaaggaaggagaggtaggaagaactgacttgcccaataattgccagtggctaagatgttacttaccatagatgctgggcattatactatccgttccaatgtcttgaaccaggattacccaccgagctgttctcttttctccttacctgataacagttgcttatatactatggagtgctcagaaaggtatttttaactaatatcacacttaggaaagattcttcagtcctaattggttgacaagccttccctcattctccaaatgatagttttatgtataaggtaagtgaaatatacaagctttttttaaaaattaatttactggtacggttaaatttacagcaacagagccaggcatcatggtgcatgcctttaattccagcattcaggagacaggggctggtggatctttatgagtttgaggccagcatggtctacaaggcatgttctggagccaataaagactatttaatgaaactctgtctcaaaacaacaacaataacccccctgatcaaaaaaaaaaaaaaaaacccacactttgaccaacactgtccagtagaattcagtaggggttagatgtattattttagattttgtgttagccacaacaacaacaacaaaaaagataaaatgaaattgatgacattatcttttcttttctttctcttagaaaggtcttatgctgactggtctgggattccaggctcaccatgtagaccaggctggcctcagactcacagagatctacctacttctgcttcttgggtactggaattaaagacatgtgccagcacacccagccgatattaatttttaccatattttatttaacccagtacatcaaaagtactgttattaagtaacaaattaaaaatttactgctgaaatgttcaatcttacatgcattctcatttattttgcatcttaatatgaaatagtgacacttaaagtttcatagcttacatgtgtttagtggctcctgtaatgggtaatataggcagtcataacctgcttttaaaattgtgataaaaggtgcataacataaaacttaccaccttggtaattttaattgtatagttcagcagtattaagtaatttatactgtcatgcaatattgtcactcctccttgggggggtgtccactagtatggctagtacttgtctgcacagtgcagtcacctgtaaagtttgaccaacctagaactggcagatgataccttgggacagtttgatgcttgtgtggtggcacatgctttaattccagcactcaggaggcagaggcaggcagaccttgtgagttcaaacacagccttgtctacataaagagttcagagcagcgtgaggccctatccaaggagcaagtagcactctgtaagttctcatgggtgatttgaatgtgtagcccaggttgaaaactactgctctaaaagaaacagagccaaactgattaaaataaagctaaaagaaaatgatagaagctgttgtctaaaaattatgaagtttccaaatagttctcagttgagcagttataattgccagatggttgcagaaggaccgaggtatcatcagtcactggtaatgagtagcccaccaggagctgggagctgagaaggaaactgcagagaactggcaggacctgcatggtcacagtcaagactgctaatgtcagcaagtgggaaaggcttcctaaggcaattcacacagcccagccaaaacatgccttgatgcactcttgttttaatttggggagcagatgacctaaccatttaaacagtgctgtgccttctacatacacctgttgttgtacactgtccgaaccaatgacctcacacactgaatgagagcaacaggcaaggggaaagcagtagagaaaacagggccaagtgcccagccgtgtaacttcaaatcctagggaaatcagagcaagccaaggcacactaagcaaatgggcattattaataagaccaacaacacttggggttcctctgtgacacctgagtaaacactgtgatgtgtccacgcatctttggacctgacagctgtgactgtctcccttccaagccacaaaagagcatattcttgtttattggcaaagccatcactgtttaattggtatcagatactgacttgcacgagtagcatccttcactgttaggaaactgtgggataccagattgtttggcatgcttttcgaaactattattgaaatgtttctaggaaaaaaatgtctttagagtaagtttgactcctcacagtcccataagttgactaggatgtatcattcttatggtaacagtagagatattaacatttgtttattaaacggcattcaggtcttctcatccctccctttgaggagtacttcacactccatggagctgtactatctgtgttctgttgtatatgtgagctcttcaaccactcagtgttttgctcgccgaatctgggtttcataagctgtctatggctaagaggcagagaagacatacattatctatccacacattcttagctttagctctcatgtgtcgaaattgttacatacagttctctctttcccctttgatgtgcaatacatatatacacatgtgctggctggtttctgtcagtttgacacatctagacaaatctgttgaagaattgcctctctcatcctgggctacaggcaaggctacagaggcattttcctgattaatgatggatgtgggagggcccagctcactgcgggcggtgtcacaccaccgggccaggtggtcctgagttgtataagaaagcaggctatcaggtcacagagagtgagtcagtaggtagtattttctcatggcctttgcctcagtttctacttcctgacttccttctgtcccctcaagtagtttttggtcttagtgttttatcagagcaattgaaagcaaataagaccttcaatgtagaaaacataacaaattgtgaaaaagaaaatacaaatcacttacatttttaaaaatccccaaatcactattaatgttttggtgaattttgtttgtttgttttttttgtttttgtttttcaagacagggtttctctatgtagccctagctgtggtggaacttgctttgtagaccaggctggcttcgaactcataaagatccacctgtctctgcctcccaagtgcttgtattaaaggtatgtgccactaccatctgacctttttaaaatttatttttatgtatgtctgtgtgagggtttcaggtcttagagttacagacagttgtgagctgacatgtgggtgctgagaattgaacccagatcctctggaagggcagtcaatgctccaaaacttgagccatttctccagcccaagcagttttaatatttttgaacaatcaaaatataaggatactataaatacctctgactctccatctttgcacccactctcactatggaaatacagatgtggggttgcatggcaggacaccaggtcctgctttctctatttctctgctcttcaccagcggccttcatcagttacctgagatttcagaaactgggtttctttaaataatggatactttttttttaagagctaaagacacagcttcttacacctttgggcatcctaggtagctggagctgtatttataggatatttccttttcttactcttggaaggatgcagttgtcccagaaactcaagtagcctgggaaaaatactttaagactttaaatgaaagctgcacagagcagccgagtgactcacttatccatcttctcgttagcttgccgccactgtgtctgctctttccgccatctcagattttcatttaggcctgtaaatcggtcattccctaggagttaagaaacacacaacaggaatttgattagcatgaaaccctctaagataaccaagagttgagcgccaagcttaactgagaagccttggcacattcttttgttaatcagtctgtgctgccatgaggagacaaagccaccatgctgtgtctgtggtgacctgccctggatggacaggagggagctcaggaagatgccctgcctttcatatttgcctgagctggggctcctgtgaggctcccctccaccggcccccacttgctggcacaggtgctgagcaccctccaaagtccatgccctcctgttgctgttttcctgggagcatgtgacatttgactgtcttaatgtgatgagctcaggtttgggtcatggggtccctaggatggggaatatgctggcactgttttggggagactgctctattctagtagcatattgaatgacccagggataggaacttgagccccagagccctccagtttgttgatcagtcccctccaggggcctaagcacaagggagacagtgcttccctcctccatcaatcactttcttggatgtggccttcacttgcttttaaacttaattagaacagggcgtttggggacttacagggtgattcttgccctcagagggagaggacaagtgttctctaagccaagcacaggattcagaacttgctgtctcagggagtgccatccaaggaccttccttcccacaaagagtgaagagctgtccaacacgtggagaggcctacccacatacctggagtgcgacgacgcatcatctccccacgggctccttccccacggagcagggcctcttccagcttggccttgacatcccttgacttctgcaggacttgattactgactttgtcagagctctgctttccctgaaaggacagaagtaggaacattcagtttagtagtgtctctgctgatagagagatttgtcaaaaaagaacacttcaggatcatggtgaggagttttttttttttaagattttatttatttattatgtatacaacattctgcttctatgtatatctgcacaccataagagggcagcagatctcattacagatagtgagctaccatgtggttggtgggaattgaactcaggacctctggaagagcagccactgctcttaacctctgagccatctctccagcccccgtggtggggagttttgacatgtagcacacagacacttttctggaggttcctatggacaaaactttattagcagccataggccactgcaataggcagacattcctcccatgcggaatggtcacatctgcaaatgcaaacaagctacgggttgcaatacagaagtgtgaagaaatgaatgatgctgtcatttctcaaagggaagagtaacaagacaagattgaaacaaaccacgaagacaccccatgcttaccttgtactcaaaacaggagacacagatgaacagcaggtctaaaatcctgttgagctgcatggaaggcaggtcagcaatccacctccgaatgaggctctggtcagcatttttcatgatccacaggaagcagatcatgaggtggcgggtggtgtctgcactcagcatgctgtattgcttatagggctggaggaggcaaagggtgggggaggcagtcaagcaacagaaaaacaaaacaaaactgtaagagatgagaacctctcagaatacggtacctacttcttgctggctggacatctgctctctgcagcaccgtctctccaaggcaagggaatgcttgcttggtgcttggtaaaggcgaaccttgggcatagttagggttaagctaagagccaccgaattgagcactgtctggtggtctgccctggaacctgactgtcttctttaatatcagtgatgcaatgaagcatttttgctactaagatctccaagagcttctttaagatggccagtggagggttggcctaaccagacacgatgactaatccaacagttctgcttcacatcaagatcatgacctgctcagcacatggatcaaattcatatgtttgtgaagtcatttgcaatgggacctgcaccaaaattcacccaaggaagggtggattctcaggcagtaattccctaggtgcaagttcattggagggtgctgctaagcacacttgctctaattcataataccaagacagacaacaatgtgtagctgcagccttgctttatgtggtgtagctaatattcagtgcaatgtggtagcaacattacaatgagaaatttgggagttatgtgaaggaaatgctagtattggatggaaatgacggatgacgaatttactttcacttaaggtattctgagtatgttgataagaaatgtgagccttcagctaaaacttcacagggagtatattctaacaggtgaacttctggcttctatactccttacaggcaattaatagaatatgtcatctagtaaagttgtatcaagaccctgcctcactcagaagaaaaccaagcaagtttcctgcagattcagatcatacattaaaatgcaaaatgaaattgactgcctagctcttgcaaaccctaggtttccctaggcacatctctaggttcataaaaatcaaacacatcaagtcaaataaaaacagaacgataacaacactgagctagaagaagtgctattttgacaagaaattgagtgcatcaacaaacatatgagccccacctcaagtacagcagaagatataccctacaaagagccctctgtcaaaggacaaaccgaacaaatctccgtaggctctctgggggactcaggaaaattgaagacttttgctttggaaactctggtcccttcattcatttattggaggtaaacattaagacattcaatctcttgtggaaacaacacttcaccttttagctcagtaagcccagctaaattccatggaaggatgctttggtttgatcttctctgtaatgatttcagagtctccaagttctcccccctgatagttttctgtacctagcacactgggactggctaaatgtgacctgtgcatctcttgctattgccatggctgtctgagcagcgtgcttctcggctgtcagtctctttgattcctgtagcacagtggggaggaagaaaccatctctgctccaagctgggttccattagaagtcaggaggaggacacaccaagaaattatctcaaggaatgtgtcccaacataccaaggaagacagcattgctccacttgtcttcaagttaaaatgattccctgctatggccagggccacattctggttgattccattggccacatcttgttcttcgtaagagccactggcgcggctccttccacttcgagcatctgcaactgcaattaaatatcaccatgggtgatgtcaagccaaagaccacatgtccatgtcttcaacccaacaagagacagaagcgtcttagttactaaagtcagcaagtaattcaagacctggtgtttaccattatttatctcgagaaaaagcagacgggcttaaaataaatgttgagcacaagtttaggctacaatttaattttccaagtgttaaaaatactttcaaagttttgtaatacttctctgtgttctgtatttaaaacaatattgtttattttaaataatgatccaataaaatgggacctataactacaaaataagtaccctgcagaataatatgctattataataaatcatgaaccaaaattgtttcaaaagtctaggcaaatgctaatttattatggccatatagtagacatgtctatatttacagaaaagccaaacttgtcaaaggtgttcaaatttagatgtatctttagcattttattttttagaattttgctacatgtatgtctgtgtatcattttcatgactgatgacctcagaggctacaacaggtcatcagacagttgtgagctgccatgtgggtgctgggaattgaccctgggtcctctggaaaagcagccagttctcttaaacactgaaccatgcctccagccccattagctgtatctttaaaaagatttgtttttattttatgtgtaaatgttagtgcctgtgggcacttcatgggtttgggttggtcagaagagggcatcagatcttctagaactggagttccaggcaaatgtgaggtgctgggaaccaaactcatattctctgcaaacaaagcaagtgctcttaactgctgagctttgcccctactaatttacaggaggaattttatttttttgatttttaataaagaagagaaataactacttccataggaatgcttgcttctcactttacaatttgcatgaattaaaggttctgggggattgttctcatcttgtgtatttgtgtgtatatgaatgtgaatgtgagaatgtgtgtgtgtgtgtgtgtgtgtgtgtgtgtgtgtgtgtgtgtgtgtgtgtgtgtgtgtgcacacgctcgccagtgcacatgtgtacacatatggatgagcatttggaggcaagaaggtgaccttgttttgtttctcatgcactgctcactttttttcccttcctggttggctgactggagaactccaaggttcttcatgtctcacctacccagtgatggcatgacaagtgtataccaccatgtcagaaatttttatgtgagttctgggaatcaaacacagatccttgtgtttggatgacaagctctttagtgactaagctatttctgcaaccccagtctcatcattttataaactaaataattgctactgtaatgattttacagacgaccagtcacacatgccactgcactggaggatgtgggacacttagatggctctctaagactcaatggtgatgccgtctgtgtaaggactgctgggctcaggcaggcaggtattcttcagactctagaccattcatcagcaaaacgccagcatggtaacctctacaaactcacagagcaaaggctattctgaagtgatcagaatagtgtacccccacttatattctctagctacgtgtatgtctgtgtaacaggaacataaatccaggaagtggggaaatttttaaaattttatgttttcttcttgtaattaagtaagagatgctgacctcagacttaacctcttgttgccaaaagcaaacctttttctgctgtggcataatttcctaatactgaaagacaccatgacttgtgtgtcaatgagctggcataaagcaaaaagttgtttggtttaaattactcccttgtaagcactgtggaaggaagtgaacatgcttatctgaaggcaacagagcagtgatcccaaaagagagtagtgaactctgctctatttcatccttttgctgcacagtcaatggcacccaccagaaaccagcagatcaatgtatgaatgtacaaatcgtttctcacaaaaagtacatacaaggatgtgttttaaaaacctgtctgagagctgggcagcggtggtatctcacgcctttaatcccagcactcgggaggcagaggcaggcagatctctgtgagttcgaggccagcctggtctacagagtgagttccaggacagcctccaaagccacagacaagccctgtctcaacgcccccctccaaaaaagaaaaaaaagtctgggccaaagaaaatctctagtgaccctgctgtgaagcgtcacccacacaagccatccacactagagctggtgagagaccttgctttctgtgtgagggacatctggcagggcctcactgatctcagacaggaaacagaaggtccttacctgtaaagtcatagagctgtggcaaggcgtccagaatgatgccgaccaagggcaagtaaagggcagcgatcttaaccttgacttctggtttgagacaccgtggatccaggtcgtgagaactcaggaggctatggatggcgctcacagcttttctctgcactctgctgattctggagacataaaaccaggctacagtgagggaggctgtgtgccctcaagcaaaagagttcccccaaatgaccctgaacagttcggtgacaatgtgaaaagcaagcaaaacaggctagaagagaggctgcctgtgttacaatcctgctctattgtttagctttctgtattcaggttcatcatatcacatgagtacttcactccttttggatactgaataacaaacattccattgtccacagagaataatttcatttactttgggactctcgtgaatgatggatgctcctggtttttgggcaagtataagtatgtatctcttgggtatgtctctcagtaaaaccactggaacaatagctagctctttacctttaaaggactaagacacatttcatgatttcttcaccatgtcacattcccagtagcagtgtatgaatgctctattatctgtcttctttactgtcatcatcatcatcatcatcatcatcatctctctcttttattgggaggtagagacagggtgtctctgtgtagcctgggctgtcctggaacttgctctgtagaccagaatggcctcaaactcagagatctgcctgtctctgcctcctgagtgctgggactaccatctggcttctctctctctctctctctctctctctctctctctctctctctctctctctctctctctctctctctgcttttccctccctctctccctgcctgctgcttttaatgctggggattgaacccaggtcctagcacatgctaggcaagtactctgccatttagccacatgtcagcctctctgtctgtctttttatcataaccatcctagtaggcaggatgtggtatttaatcttggttttaatgaagcatcggcctgactgttaatgattttgaacatcttttcatgtgcttatgatcacaccttctttggaaaatgtctgtatcaactttttgctcatggtggtacatgctttcaattccagcactcagaaggcagaggcaagaaatttctgtgagtctgaggctagcctggtctacatattgagttccaggacagctagagaccctgtgtcaacaaacaaaaattttaggtatagctggggtggcatagtatttgggagactgaggcaataggatcataggtttgaagctagcctgggctacacagtaagattttgtttcaacaaacaaaaacaaacaaaacagaaaaaaatttaaatttctttttatttatttagtttagtttagttttttgagacagggctttggaggttgtcctagaactctctctgtagaccaggctggcctcagactcacaaagatcctcctgcctctgcctcctgagtgctgtgattaaaggtgtgtaccaccaactcctggcttaaaatttatttctgcatcctttttttttttttttttttttttttttttcctgagacagggtttctctgtgtaacagtcctggctgctctagaactcactttgtagaccaggctggcctcaaactcacagagatccatctgcatcttacttctggattcttaatttgattgtattgactgatgtgtctatttgtgttttagaaccataaattcaagtagttttgctttgtagtaaattttaagatgaggaatgtgtatcttccaaatgtattcttttgtaaattttgttttggctacgttggtttacttgactttccacacacattttaggaagagcttaattactgcagtgaagtcagctggaattctgagaggcactgcatcaaatccccaggtcagcttatggaatagcgccaccccagcagtattgtatgcgctgacacatgaacaggtgaggtgtactatgtagctctcttttggcaacactgttctgtggttctcagtgcacaagccttatactttgctgaatttcttcttgagtactccattcctttggggggtttaaatagcactgttcccttaatttcattttcaggccgtttatcacaaatatacataaatacaactgatttttatattggccttgtacccagcaaccatattgataaacccaaagaggtttttgaattactgacttaaaattttctatacataacaccaggctgtgtatgagaatggagatgttttgcttctaatatccaatctttcatgtcttttgtcctagacagaactcctagtacaaggccaaacagcagtgacagacacggaaggttttctttgttcctggtcttagggggaaagcttgtcttccacgagtggtcaggtgagctgtgagttttccagaggccgggatgatgctgagtaagttctctgtgattagcactttctaggcagcagaaccacactccagtgctttttcctgcatctgttaaaatgattgtgcggtgtccaggtggtgatgatgcatgtctttaatcccagcatctgggagacagatgcagatctctgagtttgaggccagcctgatctacagagcaacttccaggacagtcagggctacacagagaaactctgtcttaaaaaaccaaaaaaatgactgtgcagttttttcctttatccatactttggagcatctgctcacctgagtgtcagatgctgaactaattctgccttcccaagatcagcgctaatggagtaaaatctcgtctgctgttgcattctgtgtgctagtgttggtgacttttcatctgccttcgtcagaccttctgacatctggactgagtttcggggtaacgacagcttcagagaaggagctgacaagtgtcctcacctcttttgttcattgtttctagggcttactggtcacagtccatcactgagtgaagccagtgcaggaacctgtggcaggaacggaagctgagaccatggtaccatgtggcttgttgcttgtttccaggctcatgctcagctaccttcctatataattcagaaccaccactgccttgggtggcactgcccagtttgggcttggtcattccacattaataattaagaaaatgatttccctaccggacaatgcgatgtaagtaatttctcaattcatatttcctcttttcagctgacccaggcttgtgctaagttgacaaaaaagaaaaaaaaaaaggaaggaaggaaggaaggaaggaaggaaggaaggaaggaaggaaggaaggctgggcagtggtggtgcataccgcctttaatcccagcacttgggaggcagaggcaggtggatctcagagagttagaggccagcctggtctccagagcgagttcgaggatccaggacagccaggactgttacacagagaaaccttgtctcaaaaaacaaaaaacaaaaaaacaaaaataaaaaacaaaaaagaaggaaaaaaagaaagaggccaggcaatggtggtgcacgcctttaatcccagcactcgggaggccgagaactgtgagttcaaggtcagcctggtctacaaaatgaatgctaggatagccagggtggttacacagagaaaccctctctcaaaaatccaaaggggagaaaagaaagaaaggaaggaagtaaaggaaatctaaccagcacaataatcacacacacatatttacttactcaaaaataataagttaaaattaaaactaaaaagtcaactgtatttatagcccaaagaagtgacttctagggccactgagatggctcagccagtaaaggtatcttctgccaaacctaaagcctcgattttgatccctaagatccacacggtggaagaactgacttctgcaaattgtccaccgacctccatgtgtgtagtcataaacgtgctcccatcaaaacaaataaataaacgcaatttaaaaagaaaggaaatgacttctagataggcaaaaaggcatatagtattctctagcactcaggaggccgagtattactgaattggaggcagtgggttatatagcaagaccctgtctcaaaaaacaaaacaaaacgaaataaaatagcaacttttacttaaaaaattattattattgttgtgtgtgcatgtgtagaggtcagagggcaactcagtggaatcgtttctgtcttttcacctttattggattctggggatggaactcagacgttaagcttatgtgacatcacacaagcacctttaacccactgagccaacttgctgccctcacccctctttagttttcagtaaaagttcaaaccagaaacttttaaatgttcattttttagcagacaaattgtactgtttctacacaaagtcacagagttgaaataaaaagaaacatgtgcagtcataccaaggtgctcacagcacaatgttcagtaaagaatgtgaagttccacaattggtaaggccagtctctggtggcacaggtcagaatagtggttacctggatcgaggactgtgactgagaggggtaacagaatattctggagtcctacaagtcccctgtggctacttaaagagcatttgtagtgaaaaaccattgcatgtcacaattatgtttaaggtcccttactgtatgtaagttatacttcaataaaaataaataaaaccatgcatgcagaatagcatttagagcatagccatggcaattcaacttcaaaagcataacttctccatctccaaaaaagcctattttcctttccctcaagtaaaataatgctacatcagaatccaggaggaggtagaaaatatcaacaaattttcaattaacctagattcttccactaaataggcaactataaacttcattttgtaaggtgtcctttttttacgcagtcctggctatcttgaaacttgctatgtgggccaggctggccttgaacacagagatctgcctgcctcagctttctgagtgctgggattagaggcatgagccaccacacccagcttggaaggtattctagttctgacactcagcctgttggctccagcagtgcggctgtcttttggacaggtgctgcacttgccagttaacacaaagacacgaggcaaatgctccaaatgctcgaaggtcacttgatttactgaagcatggacacttacggataaacccaagtataagatcgctgtggctgctcttgtggggctagagatagatcccatgagcccttgccccactagagttgaggcagatgtgggtgaatctttaacagctaaagggcacactgaccactggggagctgtgctaaagggtggctgttttctaaggtttagcctacatactgcagtcctgacagtatttccaatggctttctaggaaagtaaatgagggatggctgtgctgcccagacactgaagctgctaattagttcctctctgggtgtgtttgaagaccgtgtcaaccttattagacataattacaccatctccctgcaaactctcccttattgccagtaataccccaacaattttacaaggatcagaaacagatgtcaggcctgtttccaagtggaacaaaaatagaaaatcaaaaactactgctaatgtgaacacaagagatactctcagaaatcacttgaagctgtaatatttattaagaagcaattaagaaaataaaatcaggggcaatttttttctgttttcaaactttcttctctcaggaccttatttatcagcaactatcctagggcacttttttgttgctgagaaaatatgttagttacaggatagaaaattctactgggaaagctggaattcagttagaatagagagatgatgatgatggaatgtgagccgtggccccacactgccatacacgcagtgctcagatacacacgaggagaggattcacaagaaccgtgccggtagcatctctcttggcctggggaggcttgtccacaagaagtgtaatctagacacaggacagctgctttcttattagctatcacttcctttgccagctttgggcagtggcatcttggtatttcctctgggtgtactcaccttgtcaaaagtgaccttgaagggctgggggtgagcttagtggatgagctcatggttagcatgtgcaaggccctgggttctcctcagcagccctcttgcaaaacggttttccctaggaaattcactaacaaagcattctctgtaaactctgctcaaaaggagactttaagaacccattctgagggctggagagatggctcagtggttaagagcactgcctgctcttccaaaggtccagagttcaattcccagcaaccacatggtgtctcacaaccatctgtaatgagattgtgtgccctcttctggcctgcaggcctacatgtaggcagaccactgtacacataataaataaatttttaaaaaaagaaaaaaaaagaacccattctgaggtgggcttggtgggtgcatgcctttattcccagcactccagaggcagaggaaggtggatttctgagtttcaggtagcctgctctacaaagagagttctgggacagccagggctacgcagagaaaccctgtcttgaacccccccaaaaaagtcatttgggggctgtgaatgagcctcagtggtagagtgcacacctatgtgtgtgtgaggctctgggttcaattcctagtgcagtaaaaacaaggccatttcacagatcctctaaaccccttgcccgtctatatactccatgaaccatgaagacaagagtgcttctgcttggaactagcaagtgggagctctggggtcttgttacacacacaagaagttgactggaaacctcattaatatttttttcttcatgttccactttaggtgtgggacacttacccatccccttcagaatccagggcgacagccagctctgtgaagaggagccccgtgagaaagtgctgctgccggtactccggggtcaggtcgaacatactggcaatcttttggtcctggaaactggagcaggagcttgagttctacaaagtacaaacatcagcttgatgagtattaggaactggaatccaaacagccctggcttgcatttgcagagctctggccagatactgcatgcactgactggctaacatgagaacaaagcacacagggcctgttgggaaactaggctaggggtagagctcgacagtagagagtgtgcctaacattgctgagttcacaaaacagcaaaacaagggggaaaagaaaatatcagttaataccctccttgctcacctgatatcaaaagttgcagatgaataagcagcccaggataaatgtagacagagaaatgaggactgcacccagccccacgctatagcctgttttcccagcaccttttttgaaggttgcctgagaacactttctggacgttgctggcctgagccagaagtggtatctggcacaaaactgccagaattggcaaccctaggccactcctgtcctgtgttcttactctaggagcatggcatccttcaccaagggcagcagaaatatgtgtctccattaagtccttgcactttgctgtgtaaagtcctgtcaactctttggggcggccaggagaggaatgtggggagaggacccagggcaaggtcaatatggggtaggtcataggattcatgccacagaagaaactatagcagacagatggtgatgcatttggaattggtccttgtaagtcatgtgtgtcccgggtcacattatgacagtcatgtagctaacttcaagtgtaccatctgggacagacagctaagctaacttcttattttaactactacaatgactattattactattattagagatgaggcttcctacattgctcaggctgatctggaactcttggactcaggcgatcctcctcagcctctgagtcctggaattacaggtgcatatcactgtgcctctcattaataagaaattaattagataagcccttacctttgtgctaggatcaaggatatacaacagaatagaatctaatcctatcctgagatatcctacctgctgctctgaacatctgatttgtttcccatatgcagaatgtgactgtaaaataacattttctagaggacattaattccttgagaaacccatggtgggggggtgaggccatttccacagtcaaatcatgttgggaatcattacttctcaaactcccctccccttccagcacctcttcctttccaaggcgtttgacaaagaaacgaggttaaaggagtttccaactctcacttgactttggaaccctgtacttgcaaatatattaaccctgtatttacataatatattgtataacaatccgttaataccaacaaaggaggacttgagacttatctaagtttcctcattttctagacttacagattccttcctatatagtcagactcattatggacccttgagacaaactacttgttttgtaaacggtctgttcagatgctacagcttcagggtagcctattgtccatatctggatcaattgatctggtttgaatagcttgatttttcctctaattactaagaccaatattcacaggagatgaacgattcaactaagctaattaataaactagcttgattctttccttcggtcagtggattacctgggaggatatggagggacagggagaggctggtgcagtatctgtattcatgaagaggaggttcaggttgaggtaatgttcgtggctacagaggattctcaggaactccagccgcatggaaatgagtgttggaagggtattgagcttggctgatagctagaaggaaatacacagaggaaataaatgctgaggacaggataactggagttgagtttaacagacactaacattctttctctgcccagtaagacatcaatttgagtaaaagttaatctgagagagcaacagacaccattctgggagccccatcgagctttcatttactactattcctaacagcagccccaaacgagaactcttcccactttcaacggtgtctaatcaatgtcatagcaaacctgtgaagatatgtcctcaacatagcacaactgaacacatcttctgacaactctactaaaaaccaccaccaaaaagtgataaagtgacagttgaagcgggtactgggcagggcaggtggctgtgtgctgtggatggctttacttccattttgaatgaaaaacagttcatcctgcacagctctctaagtcctgctgttctaggctcacctttcccacatgtatcttaaagctttgaaagcagatggacttgtatctgatatgcacacagtgccttggagcccagcagttccatagtgtttactgttatttactctggtgggctcttccacagggacaggcagttggaggtgaaggattctcttcttacccagggcattctttggggtaactctggggttgatgtactttgggtagaaaggggtgttatagaaataagccagggaccatctttgtgtgtcgactctaagttgtgtgcacacttcctcagaactggcaccagcatacaccaaacttgaatttttacacattcaattatttgaaaatcagcctcaaatagttttttttttttgagcacttaaggggatttctaatacaaaagaagtaattcatcataatgatttgaaaagtatgagaaacagaacaaagttatataaaccttagtaatttaggatttacttttatgaaagcatgttgacaaatattaagtgctgtgttttgaacatggtaacatataaaacacagcacattttaatgttaactctcatctcctataccccatatggatttagacagtgagcatttcatattttactgaaagaatttttaaatcatcaatgcttatgacatattttaatattcattaccaaatctccatagtatttaaaggactcatattaaaatcagttatccttccccatccacctctttttcaacacaggatttctctgtgtaccagttctggctgtcctggtacttgctttgtagaccaggctggccttgaacctgcagagctctgtctgcctcagcttcctgagtgctgggattgaaggtgtgtgccatcaccactcagcaaggctatcttttcttgaccatcctaaaatttgcccgttcggattaatcttcaaatttttagggtgcaaaaatttatgaatagactccccaggaaagtttatgaatagactccccaggaaagtttcaaagcagataattttgtttaggacagaaatgacttcaactttcagatatatgaaaagaacaccctaaccaaacataaaaatattgtgggtcaaataatttcttaataaaaatattaatagatccatcaattttaaaataaaaatttgaaagcattaaaaccatttttattttatgattataaaataatgcatttatgtagtggaagaagaacacaagaaaaattacagtaggaaattcaaactattttaactccactaataagaaatcttcaagttaagacattactaatataactttaaaatatgtcttatttgtaatctcaaatgcacatgagctgtttgatatataatttaatacttaaaagcattgcagctaaattatttaatagtattgctagactgctaactcttgttagatacaatactatactttacagttttcaattaagaagaaattacttgatagggatcttctgcccccccccctttatttttgagatgaggtttcactatgtgtccttggttatccctaaactctctatattgaccaggcaggccttgaactcacaggcctctgcctctgtgaatgctgggattaaagtttgccacttgatagttgtagtcggaacttatggttgactaatgagaatttatgaagtgttttaaatgatatagccaccaacatctgccaagtgctcactgtgcagttcagcgcattagcagtcccaagcccagaaccggacagacctctccacagctgcatcgcatttcctgtgtgaaactgaacaacagcagtgggtttacaaagacaggcgtcttcctgggtttctttttcaagagcagctcaatgggctgcagagatgactcatctgttaaaggctagtctctcaacccaaacatcaagagcagctcaaatgcagacctccagcccccaacacctacgctgcagagctcatgagccccactgcacagctgtttcctactgggaaggtagagacttgcagccattaggcgcttacagctcgtccagctctgtgacccagattccccactgtgctgcagaacctcacctgtcatcccccttccaacactacacacacacacacacacacacacacacacacacacacacacacacacacagagatagacacacagacacaaacacagacacacacacacacacacagacacaaacacacacacacacacacagatagacacacagacacacagacacacacacacacacacacacatgtgcacagacacacacacacagacagacacacagacacaaacacagacacagacatacacacacacacacacactcagagagagagagagagacagataggcacacacacacagacacaaacacacagatatagacgcacacagacactcagagtgagagacagataggcacacacacacagtcacaaacacacagacacacacagacactcagagtgagagacagataggcacacacacagacagacacagacacagacacacatagacactcacacacacacaagcctgagctctggccacacttctttagaagttcctggtctcctggatgcttggtggcccctcacttgaagcctctgaatggtctcactggtaagggcttttccactcatgcagcctgcccagtgaagctcccgtgtcacagtcttttctggtcacacctttctcctggataaggtaccataatcctcaaagctccacagaggagagtccttgaattttacaaacaaggaaaggatagccacagaaacagagatttaaagctgttacattactattgagagtgatgatggtgatgacagcttggaagggggggacggttgttgtggttgtggtattagcagcagacatggtggccatggtgaagacaagaaatatagaaagaaggagagaagtggcaacaataactgctgcttatattcttattgctaggacattctgaaggggacactcaaagaactacattcagaactttggggagaaagctgggcatggtggtacaagtctttaatcccagcactaaggcagaggcaagccaatctctatgggtttgaggctagccagatctacacagtgagatcctgtcttcaaacaaaaacaacctctggggaagagttaacactgatatgttgtgctgcattaaaaaatatgtgcttttgggttcctgggaattcaatcactgagttcattgggttttttaacattagaattccataaccacaatttaattaacaatcctaacaagtgaaaagaaacctcatattctggtttctccccttctcctctctctctctctgtgtgtgtgtgtgtgtgtgtgcgcgcgcgtttttgtgtgtacaggccaggagttgatgtcagttattttcttctacagcttcccagcaaacccctggtatctgcctatctatgcttatctccacttccaatctgtctccaggagcactgaggtaatttgcatacattgccagctcttaggtaggtgccagggctccaaactcaggtcctcatgcttgcagaacaagcactttagctactgagccatcttcccaatcccagaccttgagtgctctggtcaaagattaaacacacagtcctgtaatttctcttaaatggtaactaagagaaatcatgttgcttagtaatttcagtttcctcatattgacttgttgacagctttgatacatgctccaggaatccaggtgatccagtgtggctaaagaacctacatactgcacagacagggtgaaagttcaagatgtgtagggctcacactgcatgcacgcacatgtgcgcactcgtacacacacaaactccctccctccctccctccctccctccctccctccctccctccctccctccctctctccccccccctctctctctctctctctcacacacacacacacaccatgacagggagaagggaactgctgaacaggcagctccaagggcactcacctggttgcaataatgcttgatgaggttgaacacgaagcccctgtccatgagtgagagaaggtcatacaagaagaaagccaggctgatgttgatcttctccgcctgttcactttcctttaaaatgagcacagagcatacaaatcatactgttgggtcctggacaggaactcccaggtcactggtgtggacactgggagaggacgatgctattatattggtccaccacccttctgggtgatgttgaatgtttagagtagttttttcttcactcctcctgttttgtacatgtataattgtaaatatataatcaaccctaatctatgtatacaatttggggcactgaaattttattttttatttttttggtttttaacatggagtcatgccatctagtccaggctggccttgaactcctgatcctctcgcctcagcctcctaaatcctttgccatcagacctggccaaaactgttttgtttgggggtgggtgggagtggagtgtgcaagttaacttgaattgcattcactgtcttcaaagaaatagatttaaaacattttttagaattatgtattttattttatgtgtatgaatattctgtgagccatcacttggtttttttgggactgaaccctggtcttctctgtaagaccagcaagtaggcatgactgctgaaccattcctccagcctcgggagaagattaataatttgtaaggattattacataaaatccagtcaggataaaacggcttaagaatttttttcttttccagttaggcagggttctcagcctgaaagatgtcagagtcacacttgggagggtgaactgagaccaggctattctttgttttttgtttggtttttacttcttttttattatttctcagcactcttatctataagatttttacatagtgagttccaggacagccagagctacatagtgggaccctgtcttgaaaaaaaaaaagaaaaagaaaaaaaagaaatctggattacacttatttctttgtgtggtggtggttaagtgtgagttgtggtgcctatgtggagatcaggagacaatgtgtaagagtcagagctccactttctccaggtaggttctgggaactgaactcaggtcatcaatcttggcagcaagtacctttactccctgagccatctcgctggcccattaaattcatatgtatatgtatatatatatgaatgtatatatgtatatgtatgtgtgtattatacatacatgtatgtgcaaatatatgtatatgtgtgtatgtatatatatgtgtgtgtgtgtgtgtgtatacacacacatacatacacacactttaattgtggatttagtgtgtgtatgtatgtgatttcaagattggtacaagaatcataccaacaagtcactgatacttagcttttgcaaactgcaaattattaccattctttgtacataaaaaaaaatactttttgaaacccttttcaagtaggtgataaatatcaccctatttacctgacaggaccaggctgtacctcccaagagaaagagtattttgtctgataaaaacatttaaatggggggctggagagatggctcaaaggttaagagtgctggctgctcttccagaggtcctgagttcaattcccagcaaacacatggtggctcacaaccatccgttatgagatttgctgccttattctggtgtgcagatatacaaggaagcagaatgttgtatacataataaataataaaatcttaaaaaaaaacccaaaaaatcatactgtaatttctttacagctctctccagccataccttaggggcttgtccagcatatttaactgctgttatattttaactactgttttccaatgagcagatttttttctgcttattaaagtaacacattcatggcaaacaatttagaaagtgaagagacagttaccttctgaggtttcactaaaagggctgcaatctccgaggtgaccacattcacaatggtcgttatgtcatctttgaagcggtcagaaaaacgagtcctccgaaaactgtcacgtttatccaggttatgtacgtactgcgccatgcttttcacctacagagggatgggacaatgtcaacatggggattggtgacctgcttgtacaatgtacaaaaggggaataaatggtttgcaggaaatctctttcacagtagacttctgagactttattggtgctgtggtgcccaagtcagctctgaactacaaaatgcttctgacacacagaacggttgccatggtgcctggaggtgggcacagtgtcctcttcttgacccctacttaggggctcctttcatgctgctgacaaaacctggagcttagctgtttaggcccagtgtcaggagacacccctggccccaaaagcctacatcctggaagacagtgtgaggctgagttctcagaactacactggttgttattgtagatgacacaagacacacaaaggaactattttaaaatgctgtctgaacgtaaagtctttttctgaaactacagtaaggagagcaggggagaaatgtccctcctatattgaattcaaaatcaaacaactgttttccagacgcaattttatagttcacatcaagttaatttctgcttctagaaattaaaatttaaactatattatgggctgatcaggactttgtgggctatctaggattttgatcattatgcagcacactatccctggaggatgtaaacgtatgttttttgagacaggtctcattacaaggtccatgttcgctcagcttctagggaaaattatgttttaagtttcttttttattttatttatttattatgaatacaacattctgcttccatgtatatctgcacaccagaagatggcaccagatctcataatggatggttgtgagccaccatgtggttgctggggattgaactcaggacctctggaagagcagtcggtgctcttaacctctgagccatctctctagccctgttttaagtttcttaagcctaacttatagtcaactaatcaattaatcacttgataactagtatgatactagtttaatgcctactacattttaaaatctagatcacatagaattttgaggttcttcctgggccaggagatcccagggtcaatatattcctttggcatcatcagaagttgagtcttacagtcaagtgagtttgctgagaactatttgggcagtctgactggaaaggttggggatggtggttattgctgactgtcaacttgacaggatcaaaaatcacccagagaaaagccttgggcatgattaggtcaactggagtcaggaagtcctgtgcctgtgaacagcactgttccatggctggtttccagactgaacaaaaatggagaaggggaggctagcaatgtattcataactgtctacttcctgacatcagaggttgtgtccagctgcctcaggctctgccaccatgacctccctgccatgaaggactgtatccttgaactgtgagccaagataagctcttccttccttaatttcctcgggatattttgttgcagaaaaaggcaaagtatccactacactgggatttcttgtagctctgggccaacattgggaaatcatgttcatgaatttgtacaggagagcatgagaaccactccacaactgaaacacatgttcatgaatttgtacaggctagtcagagcatgatggcaaaagtaactgtcaactgggcctggtggcatctacctgtaaccccagcaatcaagaggtggctgtaggagaatcattaccaccccaatgtctgactgctctacatagtgtgttccaggtcagccagggctagtgagaccctggctcaaagcaagcaaacagaaacaatctcagccaatcagaaaacaagcaaaaaccaacaacaaaccaaccaaccaaaaacccaacccaaccaaaaacaaaacaacaaacaaacaaaaaccaaaacaaacctaaaaacaaaatgaaataataataataaaaaaaaccaacaacagaagagtgatttctttggaagctgacccactcacatttgccccatctggagtcctggaagtcggcttccactctgaagaacaacaccagatggacctgccgtacactaatgacagtctgtttctcaaaacgtcaacccagctaagactgagaaaatagggtacaagcacagaggaggcaatgcaagagggaaggacagagcagctttctgatccaggtttcatagaatgccctggctagttcacacagaccaaagcacatcaaatccaatggaagaacacggcttcttctaacccaagggtactgtctaaccctggacacacagacatatagacatgtccatattcccaaagacccacacctgcatggtgagaggacctggataaggggtgggaacaggacaccatttttttcttttttctttgtcaacaaaagtatctctctcactacatcacagccaaggaccagggagaacaaggctcctttgttcaggtgaccccaatcctgatcctctgctggctaacccaacctagcgccaggctgttgaactcattgttccatttggctcctgcctgctgagtttggccatcccacaaccaaataaataattcttacaatgctgtacttccctctgatggcttctgtccagtcagtcagtaacctaccagctcttggatccctgactttccacagaagaaccagcagaaatatcagtggggctcaacctatcattttcagggtttggtgagatagaaaaacattttctcccacatttgcctctgtggcccattctgagaacagatacctttcagaacaccctcgtgcagaacgccatgtccagaggaactgggtcacctagttacctctggtccttcaagggctgaatcagtggtttctagccacatgggctcattcattaaaatgtgtgaaatgcacaagaactaaatgtactagcagctcctgtgacaaagttattgttcattagcaccagtggccagcacagctggaggtgtcaaactgcccctcggctgcctaagtccttgggggaagttcttttcaagctgagcatctgccaggtggtatgcaacaatgcatggaggactgagggccccctctgggtctgaggccagtgattgttccaggtcctcgaccacagccccccacatggcttcttgcccttctccatctgtgagtgtttaggcatctgtacactgtagcaatggtcccttccctttcctccctttggcttctggttgtaaccgtgaaggggagactgtagcctgagatggatggtgaaaggtttggccatttgtcactcctactgctgcagagtggtcctaccatgtggacccctttctctgcctctagatttcttgatgccccaactgctctgtcccctctctgtgattcttcagaatgaggctaaataaataaagggttcaggcagctgttgcatcgggagtgcctaaccaatctctgttggctcctgtaacattgctagcaccctgggtagaagcctggcgataaatgctccccagctgcctggaccctgacagagtggccacagtctgtgtagccgctgtcttggtgggtctgcattttaaccaaccccatcaaagtgctttgatccatgagagcttttttcaaccatgtcatctgtgcagcataagaggtcctagagttaagaggggagttttcactatagatgtcactttcttttgggccaaacaagtcttagtaagacttatgccagatcagaagcaattgtcaccttttctgtgattcttagcctcttgtagttatgggcaatggagcagtactgccaaagccctagacaggcttttctctggccagcactcttctctaacttcaccaaaaaactcagaatcataaggaccctgactcaaggctgcatgaagattaaaggatacaatgctttaaaaatgtttaaagcagtgcctggcatacatacagtaagatgctcaatttactttggatgttgttatttttatttttgcaggcataccagctgctactgggattccatgaaggacagagtcattgttacaccgtatacaaactcatctttaaaatggagctataagatgcctgtggaaccactagagctgagctcacgataacggggaaccaaataacactttgcactaacgaggacttctgaacgggatgggttagcccattgtcagtaagtatggtggactgagaagtctggaaactctaagcttctcaagaggcaaatagcaaatagaaagaacatggacctgagcattagagaatgaggctccacctgtccctggctgagcaggctggcaaacctctctaactctgacgtgtaaagtggagataagcaggggtctcagggtttcaaggatggattcaagaggcccctgagttgccactgcaaccctcacatagttgggctttcccaacaagcacagtgctgcctgtgatctaagagtagttcaagtgtgctcgtgtgagtgcaaaggtgtgaattaataaccaagacacctttaattaaggcagatctcgtctttacttttttaatcagcgattttgatttagaatttgggattattttatgaattatgtatacatggatcatgggccaagtggagcttctctgaggggaagcttgatggtgggtgaaactgcaagcagaagccggacatacaggacttggttggtttggttttgtaaatactctctgtgcctcaagaaaaagaggcaagtgagttttgttgccagtccactctgtgccagaccacagggctcacgtataccctgatgatgctattaaccaaaggctgacaagttgtagccacaagccttaaccagcttggcttgtagactaagatctgccgctgaattgtttcaaaatcccaaagccctttagctagggttaggactcacaggaagaggtggtggtggggactagtacattgtaggtgtgtcttgaggtcacctgggaagacaggtgagtgcacagagtttcctctactcccacagggaaaaggagccgaagaatctcattcgttctatcaagcactcctgtgcgattctggggtctgagtcagtgcactggagccattctcagactaggccaggggatgctgaaactccagggtttcagatcccagactgtttctgtagtaaaaagctagattcttaattcagggcatggcatgcccttcttccttccgatgtgtggttatcttcatttcctttgaccccctttcctttctctgtctgactgctcagtattgctgcttcctcagccttggatttacattgagaaaaaaaaaaattctactccctcttcttaaaaatattattcacttattgtcagaggaaggaacccaaccaacataaagcaataccacccccatgtcccagtcattcctcacctgtgactttgtaccttttccatttaatatcatttcactctgcatctccatttaacaatatcaaaatagcactgtgtttgggacagaggccagtagtagaatgctggcctagcatgcaccagaccccaaatataatccccattacatcaataaaaagagggtatatgcttataatccttgtggtggggtgtatgggtgtgtgcacgtgagagtgtggtcatgtgcacacatcccacacacctggagattaaagcaggactttggatgtctcctgctgctgctctctgcctcattatctagagactttcactgaacccaaaggttacagatttggcatgtcaatgaggtctttggatttacccatctctgtcctccaatgctggggtgacaggcacatgaagccatgcctaatttcatatgtgggccccagggattcgaactcaggttctcatctcgaagagcaagtgctcttactgagtcatctcctccccagtctctgttctgaatggttttttatgacggaatctcttcatgtccattagtactgaactacaagtaggtatcagtagcactgttttaaaatggaggaactatacatgtacatttcactgttctgctgggagacggacagcagtagtagggtaaacatagacacagatatcatactctttccaaccagtgttagtgcagttggtattgtctgtatggtatcaaacagcttgctaaggcgaaagccagaataatgaagacagaccaaatcctagaaatccaataggtgagacaagaaaaacgatgacagtttgtgtaaagtgctagtaaggggataaacataaagaggaatacccattacaggataaggtggccaaagaagggctctgtgggtggtgacatttaagctggagttagaagatgagccggaagtgtgatggggataggtaataaaaagtaatttgtgagagggaattaaaaaaaaaaaaagccaggcaatggtggtgcacacctttaatcccagcactcgggaggcagaggcaggtgggtgtctgtgagttcgagaccagcctggtctacaagagctagttccaggacagcctccaaagccacagagaaactctgtcttgaaaaaccaaaggaaaacaaacaaaaaccaaaaacaaaaaaggtcagacctggtactttccaggaactaaaaggggcacaatatggctgaatgagggggccctggcatgagacagaggattgtacaaggacacattaggattgtacaaggatattttagctatgaattttttttttaaatggcaatttatttctagcatactggaaaccatgatgagattggctgtttggggcaggagagatgggatagtgagaaaaaaaaaatacagggggaagagaaaggaagatgctgcaagaggcacatgagaaatgatggtggcctgaccaggtgagaggcgtgacgagatgcaaaaacggggattgattttcaaggtggagtcaataatgtttggaggaagacggatggagggtgaaggagaattgcatttcaaggaacactccgaggtttacagccagtcctgacacagaaaactgcctttcccatgtgtgctttgcttgtctgaggagcagagatacaaatgcgagaatctcaccagaagttcgaagaagaaccaggcatacttgaagacggtttctctcactagtccagtgctgaccaccatctgcagggcgagctcctcgtgaaaatgctaaacaacaagcaaacaaacaaaaaaccaggctgtgatggcaagtattagccacttttccttctttgctaacataatacctggttagtttcagaagcatgaattctgaacttaccaggctgtaagtgacagctgacaacatcagtgctgaaacaacatttgggcaggggcataggatgccattgcaccatatccccagccttggaataacagttgcattctctggggaagccctcctgggtagtactgggaactggtgctgtgtgttgtagagcaatgacctttgaagtcccacagaccatgcaatgcactcctctctctacccttcgtttgctcatccacaggactggtctgttgttagcaatgatcctcaagtttgaatgtgaatcagaatcccttggagacttagtaatactcggctagctggtgccacccttagagattctgattcagaaggtctggaactgagaatttgtgttctatcgagtttcccaggggatgctggtgctttggtcctgggccacaccctgaggaccactgtttggatgacagccaaatgccttccaggttggacaatttttctttgcagtcccactatagcttcatgtgggaaatgtgagggatgggtttctgagtggatctctgcattaaaacacacacataatttttttttttaggctgggtggtgatggtggtggtggtggtggtggtggtggtggtggtggtggtggtggtggtggtagtggtacacacctttaatcccagcactcaggaggcagaggcaggatctctgtgagttcaaggccaacttggtctacaaagctacacagagaaatcctgtcttgaaaaaaaaaaattttttaaaggactgggtgtggtggtgcacacctttaattccagaattcaagaggcagagacaggcagatctctgaatttgaggctagtgtagtctacatagtggttttagaccaggaaggaatatatagtgagtccctgtctcaaaacaaaacaaaatggggcagagacagtggtataaccctgtgtggggagaggatgaagtcctgagtgaacagacattgttgacaaagggcacagccatgtcaaggaccccatgtcaggactatatgaaatagtaagacctcccccggtccaagcactgatgttgactgtgtgtgcagaaagtaccaaccacagttttctcctccctgatgacagcaacctgagactgcttccttacagagatttcctaccatgcttaactaacctgcctcctcctctagcttatataacaaatacaccgagtctccaggctgctagtgtgtctccattagaacctacagcccactggatcccagctttcctgtacacgtgtctgtggtttcttcatttcccatcaccctagtgaggtcagtcctaatgccacacaggtcatggcaacccagacctcttaagacttctaaagtcccacgtcccagaggcagatgcttgaagattcactcagagctgtatcatgccttctcgtcccatccagtttcctgactgctctgtagcaaacgctacatagacagtacattttaactttttatcttcccattcttccacctaactgggtacttgtttattctctagacaaccgttttgatggcgaagaagctgaggatcaaaaggaaggctaataacacatcttggtttgcttggtacttttctgcccccaaaactgaaagaccctcatgatggggaccttctcagtcctggacaaatcaagacagtgtcataccaactaaatgcagaagcaatggccagaattgtggttttcactcatcttacacatacatagaaccccgagaatgaacccagacagactcttgtttctcagtgactaggagactgaaaactatttcaacacgcaaatatggcatctttatgtggaagtagcaaaaactggttgtaacaatgactgctcattacgaacttaaaaattacccacaggacagcatgcacatgattaattttacttgatagtaaatgctttatagatattcaaatttgaggggtacttatctaaatggaaaggagacaagtggaaagatctctgagcagatgtcagagtgttctattccccaacccccctcccaccccatcagttcaactcatccactgtatttccgttctaccaggtgggttaaaccttcgcaattttaacacgagggagcatatttgttagctgatgtgagtctgagcctgtgccatctgggaaaggtagggttagtgtgaacctgctgttgccaactgtgcacgtgatgacatgctacatgtccatcctgccatgggaagaaagacattctctgccagccttggagttagctgctagaaataggtcagcctgtctgccagagtcttatggcaggaagagattagacaaggataagctgcttcttaatgtcattttatgttgcttactggacagtgttattgtaagaacaccttgctccagaggttatagaagacagccaagcagcaaaaccctgtttgctgagctataaaggcaacacactggctaagctaccctctgaaataaaactgcctcccttctggtcattccaggtcaaagcaagccagctgcaaaaccaaacaggatatgcactaaggaagtcagacttttaggtcagtatgttgactgcttcaggtttttattttatatatttttatttttatttatttatttgagacaggagtcactatgtagctctggtttactagaacattctacatagatcaggctggtcttgaactcacagaaatcactctgcttcttccaagtgccaggggttaagggctgtgtcaccgtgctcatccttaaataatacagtttttaaaggaaagccaaacttgaaactggtggctgtgacaacctaatgttaaactttagagtaggtgacaagttagttttgggcctaaccacacgttctttcccttttcctctcatagttaacttctggaacgtcttgctgacatttggtgcctggattactgcagagtctacagtttcaggcccagtggcaccttccactccccatcctttactcctccatcttgaggctcatgctttccctgcctgtgtaataaaatcttcctgtgctgttagcacttgcaaaacagctctgtgtgtaactgcagttagtatgtctgcccttaaataaggatcttgtgagataatcatgacctcaacttaagtagcttccattcttgggtgccgtgcctagtagagaacacttgacagaccactggtttgacagctcacatctcttttgaccaaatccactgtgctgaccggggagttcaattggtttcaggaattccctactttgcatggcttctgatgtcagagttaaggctgacgataggtcatcaagaggaatcactgagattgtttcattctgcagttggtctcatttcatttcattcattggtcaagaaggcatatgatttcacatagtattgaaataatatctatttttgccatttacttttgtcaaggatgaactttcaccagcttaccttcccctaaaaaagaggtgaacatggtggttctcaaagctggttatttaaatcagcaccatgtctggtaacttgtttgaaatctaagtttttagaacccagatcaagtatactgatttagaaacaatggagaaagcccccctcccccaacacacacacacacacacacacacacacacagggcagagagcacttcatgtctattttcaactgtaacttgaagacacagatgaatcctttcttgtgctgggattatcctcataccaccccatctgtacctttttgctgactggtcttggggctgcagtggaacctgtagcatcattattgccagagcaatagtaagacatccggctgcagtttcgatcagcaatctgaaacacataaaccataacccactgtcaactgatagtgaaacactggaaggacaaagtagctccctggaaatcacctcagaactcatttttaatatatgtccttttctgtaatagaaccaaaataatacatatataagtatatatgtattatattatatataaatacaaaacatatataaatacaaaacaaagcaaagaaagtaaattaattttatttgctcctgagataatcactgttaatagtttagtgtgtagtgatatggagtaaaagtgtagttaagacacaggaaccaagctcaactactgggatcccccctggggataaagcaggatgtttggagagcagccctcctacaagggtggtgacaaaaaccaaccaaacaaacaaacaaaaaacccaacaaacaaacaaacaaacaaacaaacccccaaacaaacaaacaggaacaacaaaaccccattagtttcaaagaaataaagaaagaaaaaatacataaacacaacagagatcattctggaaatgctcctgactggggaggactctattcacaaagagagagagagagagagagagagagagagagagagagagagagagggaaagggagtgagagtggcagagaaataaagggagggagggagagagggagagaaagggggagagagagagggagaagatgaatatgtacttacaaagaggagagatggagttcaaaggaggcggggatacacaaaccttagattcaaacagcataacccacatgggacaaagcactgagaagacatgcagtccagacagaaatcatgtggtctatacaacaagcaggtgctaggaaagcccctctactccagcctgatgggagcagtgccaagaatgtgagtcagtggtgaggggccgttagaggccaaggccttccctgtacagctagctctgaagacttcaaaccatgcagagttctacacggaaggaattccacaggcttcggtgagactcattagctcccgagaagtggacaagtagtgtgtgaggaccaagattcaatgtcaggaaaggaggaggtcatgggaggcttgatggctgacgagactgtggcagataagatgcactctttttttttttggtttttttgagacagggtttctctgcgtagctttggagcctatcctggcactcactctggagaccaggctggcctcgaactcacagagatctgcctgcctctgcctcccgagtgctgggattaaaggcatgcgccaccaacgcctggcagcaggtggatttctgagtttgaagccagcctggtttacagtgaattccaggacagcccaggctacacaaagaaacccagtcttaaaataaccaaaaaagaggaagaagaaataaagaaggtgacttcatactaattaaagaaacaatttatcaagaaaaattacaattataaacatatatgtactaaaaattagcacacctaatttcataaaacaaaccccactgtatttaaagggacagatctaaactaaatacaacaatagtaggtaacatcaaaacccctcttaccaataaacagccatgcagacaaaacaaaacaaaaacaaaaaactaacagagacatcagcattaattcacatcatgaatcaaacggacttgacatatgtccacagaatccacacaaaatgcagaatactcgttcttctccatagcccacagaactttctctaaaataggccacattgcccaaaatgcaaaacaagtcttcctaggaaataaaagtaagtcgaactttttgtaattttgtctgatcacagtgtaatagaactagaaatcaataataagagaaaatacagaaaatatacaaactatcagagattgaataacattctattgaatgatgaatatgacactaaggaatcaggagggaggggctgagaacatggttctgtggagacagttccatgggcaaaagtccctgctgtataaactggacatcttgagtttgatcactggaacctacttaagagcagggggagagaactgattctacaacgttgtcttatgtcctccatatgcattctgtggtctgtgcacctctacaccctacacatacacatacatacacacacacacacacatacactctctctctctctctctctctctctctctctctctctctctctcacacacacacacacatatacaaatgatgcatttttaaaacttttcttaactcagataaatattgaataatttagtaatgtacctcaaagtcttagaaaaataagatcaagccaaatttccaattagtaggtataaaatgatctaccaaagtcaaatcagtagatataaacagtttaagcagatctacaacaggcatcaagattgacactgtaataaagtctcctaattaaaaaaaaaaaaagctcaggtacagatggagtcactgctaaattctaccagaccttccaagaatgaacatcattcctcaaactactttaggaaacaggaaacagggaggaggccacagactcatcctgttaagccagtattgtccttcacccaaaccagaaaagaacacaacgacaataaaattctaagataatctcccctgaagaacatgaatgtaaaagttctcaataaaatactttaagacaaaattcactgcgtgccagaaagatcattctctgactaagtggccttcctgccaaggacagtacagatatttaaatcaatacatgtaatacacatagccatagactcaaggacagaagccacgtgacctcaatggatgtagagaaggcctttgacaaagttcaataaccattcatgataaagtctctggaaatgttaggaataaagaaacacatcaacataataaaggctagacataattccaaaccgattgtgctggctagttttatgtcaacttgaaaagagagcctcagttgagaaaatgacccttcacagtggcaagggcaagcctgtggaggaattttctccactaacaattgatgtgggaaggcccagctctctgtgggcagtgccaccccttgagcaaacaatcttggatatggtaagaaagcaggctgagcaaaccatgaggaacaagccagtaagcaacagagttctccatggcctctgctttagttcttatctctaggatcctgccctgcttgagttcctgacttccctcagaaatggactgtcatctctggaagtgaaataaaccctttctttcccaagttgcttttgatcatggtggttttaaccacagcaatagaaacccaagatacctatattcaacattgtatttaatggggaaaaactcaatcatttccattaaatcaagagcaagacaacagtattcactttctccactcttatttaatatagtccttgtagtcttagctagaacattaagttaagagaaatggaacaagaaaggaaaaagtcaaattattcctatttgtagaaaatatagttgcatacataaaagatatttttgtctccaccagaaaactctccagagagtttacctttagcaaggcaccgggaaacaaaatcaatatacaacaattagtagcttttctatataccaataacaaactcactgagaatgaaatctgtaaaataacagtcttaaaatacagagaaacaaatctaactaaagcagtgaaagaccccctacaatggaaaatttaaagcctggaagaatggttttatagaaaacagcctttttgtgatcacaggttggcagaattaatataatgaaaacatttttaatactgaaagaaatctacacatctaatagtactcccatcaaaattccgatgacattcttcacagaaatagaaaaaattacaatatggaagcacaaaagatcccaaatacccagagcaatcctgagcaaaaaatattggaggtgtcacaacaaatatatggtttcaaattatactacaggagcatggtaacaaaacagcgtcatattgacacaaaaatagacatgtaaatcaatgtaacagaagaaccagaaataaacccacaaagccatggtcatgtgacttttgacaaagatgccagaaatgtacattggataaaaacagcctctttagtaagtggtgctgggaaaattgggtatcacatatagcataatgaaactagatcttcatctcttaccctctatgagcatcaactcaaaatgggttgaataatttaacataaactagaaactccaaaactgtttgatgtaaggcacacacttcaaaacagcagcaactactttgaaagaaagaaagaaagaaagaaagaaagaaagaaaagcccaagaactgacaaatgggattgcttgaaattaaaaagattctgtacagcaaagtaaacaacactttaaagagacaacccacaaaaaaaggttgctacttatatgtttggatatatagagcattaatacctagaatataataaggacactaaataccaaagaatggaacaaaccagtcaataaatgggctaaagaacaaacagttctcaaaaacaaagtataaaaggccaataaaaatatgaataatatacaggatctttagccatcagaaaaatgcaatcccaacactcatgaagccgaggcaggtgggtcaggagtccaagaccagcttgagttacgtaagactctgcctccctgaaccaagaaaaaggaggaggaagaggaaaacatagaagcatcaataccgaaataatctttgcaattatagctcactctcatcacagtagcttgtgataatctattatttatgatttattaaagcttgcctgaggattcagaaagcaaagccagccacaagctaaagaagccaggcacagcagccagaagttaggagatgatggtacacacctttaatcctagaactcaggattaagagatagatggatctctgtgagtccaagaccacgcagatgtacacatgtttgatccagtcctaaagagaaagagctcacacaaagatgatctcagcacctgggattacacacttttaatcccatcattaggaggtatataagacagcagcaaggtctcagtatcaggcattcattctccaggcacactgaagataggaggcattcattcttcaaccatgtagagaataggaacatcccagcccttttagaggtaagacctctctaaaagcttggctgctttgcttccctgacttcaccttgaacccctatatctgtctctggatcttttatttgtcatattacagtagctatcatcagaagagctgtcattttgggaggcagtagcttaagaagtcacctctaactggggagctatgggcagttggctttgggtggaggaagtcagctttctttatgagtgcggcttctgataagtaagtaggtcaatcatactccagtggatgaccctgcaccatgagtacaggtatatgggcagcacaaacttgactttgtgggttattttaaaaaacacagaaaatgaggacatgaagtttggtgtggatagagaaatgggggaccttggaggatctggggtgaatatcatcaaagggtttgtgttaaattatcaaagaattaatacaaaatgaaaacagttgtcattaagaaaataaacatgctgggtgatggtggcacacgcctttaatcccagtacttggtaggctgaggcaggtggatcttagtgagtttgaggccagcctggtctacagagtgaatttcagcaaagcagagccacacagagaaaccctgtcttgaaacctgtgcaacccctgcctgcccccaaaagaaaagaaacatcagcaaagtgcttctgaagacggatggaagagaacccttataccactggttggtatgtaaactggcccaaccattatggaaatcagtatggtgggccctcaaagactgaaagagcactaccctctgactcagctagaccacatctggctatgtaccagaaagactctcagtcacatactagacagctatgagcatgtccaatttattgcatcactatttgtaagagtcaagcagtgcaaacggcctgtctattcacaaaggggtagagaaggcgttgtaagtgtacacacaaagaggttttattcagccatagagaacaaagttctattgtttactagaaaatggatacaactggagaccatcatattaggtgaaacaagccaaactcagacaaatacaaatgtatatgttctcttatgtgtggtgccaaggttgtacatagacacacaaatccacttaaatacatatgaaatgaaagcagaagggaagaagcagactggtggaagggataaagggaatggagatggagagaagggtattgaggggtgatggtaaaagcacatgagatacttgaaagaaactgtctttataaaaacccatcactgtgtgcaatgaatatggccaattaaaaagcaagacaaagcataaacaccaactccacattaatagttttaattttaaagaatcacatgatcatctccgtaaaaggactatgaaagctttcgacagaggtagagagatggctcagtgtttaagagcagttgaggttcttacagaggacctgagttcagctggtcctcttacagaggaccagcacccacataatggctcatagccaaatgtagctccatttccagaggatccaacaccctcttctggtatcttctggcaactggtatgctcatacatacatgcagaaacatttccacgtgcaaattaaataaatgttttataagaatatttgacaaagtcagcataagggaatcaagtcatggtggctcatacttatagcattcaggaggctgaggcaggagaatagctgtgagtttaaggtctgtaggagttacatacggagttctaggctaatctgggtttacagaaaccctgtgtcaaaaaacctaacaacagtggggcagtgattggtgcgtgtctttaatcccagcattcaggaggcagagataggcagatctctgagttcgaagccaaattgtcttccgagcaagttctaagacacccacgcctacacagaaaaactcagtctcgaaaaacaaacaaacaaaaatctaaaacaacaactaaaagattcaggtaccatacagttccttcagtgttttgagagaacagggaaaaagcaggagaacagtgccctgccatggttcaaagttgtactacaccaaacatcaactgtcaaccccttactacaaaataaccagaaaaatattaccttagcatatctggaaatttaatattttcttttttattaaagaaaatttaaaatcaaggctgtcagcaacagccgcaatcatgtcttacctagccaataagaaaacagtagtgctggcccctgtttaaaaccactctctgggtggtgggggtgaggacacctcatttggagcatttgctcatttctgtgtcaagcaataacaatgacaacacacttattgcagcttttttggatatgataaaacccatgggattatgaactttagagggatgaactctatggcatgtgaattgcatgttttcaaaatcctaaataaaacatctgtgagtcattgaaactgttaagataatgaaaaacaagggaagtctaagaaattgccatatgcacgagaagtttaaggagacaagactggaaaatgctgtgtggacccctggagaggatctcagaagagaaaaaaaaaaagacattagggaaaatcaaggaaatgcaaattatgttaatgataattacacatttatattggttcataagctgtgataagtgtaccattctaatgtaaaacactaacaacaaggaaactgagtcactacagctatgttgacaacaattaaatgcatattttaaaatagttacaagaaaggacttttgagcacttctagcatgaaggaatgatatatgtatctgagcaactgacatgctagattgcctaggtctcatcactatacactatgtaagtgaatttaaatattatactgtatccactgaaggtgtctaactgctctgtgccaattataaaggataaacaatacatcgaaagtacttttgaagacctacatgagaccctagctcaaaataaaacaaggagtgtttacaatgccatagctcagcaggagaaaagctccaagtgctatcacacagggggactgccactaatgacactgtaacaaaggattcaaaatagctaggcaagacaagtatgttagttagcattcatgccacaaaggaatgatgtctaaatgtcttaaacaccctgacctgattaccatacagtgtacttgtttatcaaaataccatactttatccagaaacgtgtatggtatacatcagctaaaaagcaaaacaagtgtgcatggccttctggggctgccatgcccctacctttgaagacatgatgttcttaacttcctcgtccgctgcacagtgtgccccagccaggtctggattgctgctgctcatcacacgggcctgtatcagctttgaactcacggcagcagcagaagtgcgtccataggtgtggtatcgggggtcggggatggcggcaggaccacctgtaccccagcagccagagacatgccaacagaaaggacagattcagttacagagcttgagaaggacccattgagggaggagtagagctaaaatgcaaacctatcagatggggccttggaaagaggcctcattattctgtagctgtgaggggcagggaggcaatgctggtcaaagtggcagggtgtgagtgaggtggtgagaagtggggagggctgagaggtgggcaactggagaccaatttgtcactgccacaaagaaccagaccccaaggttgccagagtttttgaaatctccagcagaaccagaaacatgagtatttttgtttgatcaatatttatggaggaaggttgctcagaatgagtcatccacactcattgcttgaggacaggcatatgcaatgtatcagagtgagtctaagtcttgtttgaaaattggactgaaattacagacttacgtaaaatatgaccgcagagactaaagaggtgcaaggtttatttggatgtggtatttttaaaagttcattgatgatatttttatatcatgctacccagacattatggtttattgcctatgtaaataactaagaagaacagtgaggtgaattattattaacttagcttgggggaatgggaagtttttcttatataattaaagtttcagaactttcagtgtgtcattgccattggatagatactgtttgttttttgtttgtaactattattctagaatctgacacagtcaacagttctccaatcttttaaagcagagcctcaactgaatcatgaattggtaatgggataaaggtcactgagaaattacggactagtacagcataaagagagatgagagagagaaacatctagacgcttttaatttcagcacttatataagttttactttgagaaataaaactgaacctttagtcccatggcagtggtatgaggtggtactctgctaggtactgtccccccaggaaaccttacctgacttgggtgcatccctgtgcagctcaggcagccggaagacataatgcacgtaggaggccagcaggcagttcctcccatgttggtcctttctcaggtccttgctgttgtgcaggctgtttgcaatggccaccacagactcaaaggcaaactgggagaagtttgctgaggagccaaaagaaacgacaagttgaggtagatgttctcaggccgataacagtactgaccaccttagctaggcaaaagaaatgatgtgggaagaagctatgtttcaggcaactccagtgttccagctttgctcaccacagacatgctcacagtctctctgtgtagctcaagctggtctagaactcattgtactcctccagtatcataacccaccatgcctggttcacattctattcctttttctgcctttgctaggagcagtttcccacaaccaggttgtgtccatgtccacatgccaccactctctaaactcagctgaaaacaggctacgctatgcgtcctgcagattgacagtgtcagcatcaccttgggctttatccttagacactaccccagatcagctgaatcagtctacatttccacaggatgcccaagggattcgagagcgatctataaatctgtcctgcaacagattctcatagagacgaatcttaaaaatgtatacagcttatgacattccccacagcaggtccatgcaaactttctataccataccggtctgatgctccaagcccttcatcatttggctttagccaactttgtttctgtttctgctcaaattcagctatgtcctagtgaagtagttatcagattatcccattttgtggtctttcctccttcgtgactttgctaatgctatcgtcctcacctggagtggcttccttgcctcttcccacaaaatcacagtgaccacaaagtcaaaccaccccttttacgctcagtctcctgcatgaagcctacaatgccccacagtgataggaatccaaatcataccatctgaagctgtgcctggtggtaaatttagcctctccatgaaggcaggaaaccattccaagacctagtgtatttctcacagtttttctgcctcctccttcccacactgtgccttccataacattagatgaagcagaagcagtttccaaacgagtgcttgctgactaagtccttcgttgtctccatgtgtatatttgtggggttttgttcgtttgttttttttcttgatacagggtttctctgtgcaacaactctgtggaactctatttgtagaccaggctagcctggaatttgcagagatctgcctgcctctgcctcctgagtactaggattaaaggcgtgcaccaccctgcctggccatgtacatatgtgtgcacatatgttcctgtgtgcatgtgcatgtgcatgcagagaccagatgctgacattagatgtctccctcaattaattgctctccaccttttttgttttttgataacatgccttaacttgccaagcaggctatgatggctggccaagtgagccccaagtatcctcagcaagtaactgaactgctgcttcacctccaaaaactttaatattaaggatcctatttaaaatcatttttaacatctctttctcccccatgccccccctctctctctctgtgtgtgtgtgtgtgtgtgtgtgtgtgtgcgcgcgcgcatgtggagttcagacaacaacttatgggcgtcagtactttccttctaccatgtaaataccaataatcaaatccaagtcatcaagcaggcttggagacaagaaccttcatttgctgagccatcctaacagccctaagaacccattttaacgctctctctttctctctccctgtcacctcttcattcccttctcctcttccaaaaacatcttctacatttatttatttgatttgatgtatacgagtattttgcctgcatgtatacttgtgtaccatgtgaatgcagtgcctgtggaggtcaaaagagccatcagattccttggaactggagttacagattgttgtgaactacatgagtactgggaaccgaacctaggccctttgcaagagcaacaaatgcttttaatcattgaggatcactctagcccttcttcctttcttttataaacatgtagggagtctgacaagacagcactggacttgacttcacgacaaaggttgcacaggttgttcacagcatttgtaggtttgtggaaagctgagattcattaggcaaactgcctggcctagccatgcttcctcccagaccacaggcctctacctgtttgtccagcaatgaccatgggctgcacagaaagctggaagagtttgtccagcaccaggtggaggaagagcaccaggggctccaggcgggaggagttcaggcagatgatgctgagttttagctcatgctccagtgtgctctctgtgatcttctggtccagaacacggatagggaaggtcacttggctctccagagagtggcaaagggtgaagaacttctccaggtggttgtcctgggaaggcagaaggtagaggactctcatgaggtgttattctttcaacatccacccaggaatttggtgcaatctcctagccagtgcttcagattagaagtccaagtcccggatacttctagcaaagataatggactttttggtagaatgtgatgtgcaaaatataacttttttttccaggctggccttgaactaacagaggtccatctgtctctgcctcccaagtgctgggattaaaggtgtgtgccaccactgctcagctaaattaggacctcttaagtactattaatcaaagaaaaaataaatcaggcttcaactcactccataggcagagttgttgcactaggtaccacaggccaagaaagggggctactgagatgtataatccagtgacaagctttgacattccttacctgggtgtgaacggaagacacagcttgcacttcaatattaaatacccccttatggccctcagcccacttgatggggggattctgtaaagggactttctgtgttaaagagagagaaagaaaaaaagattagcaacggtgattcccctttccaactgttaacaagcaacttgtctgtgaatggcaggttctacaaacagagaacttcacagctaggagtcagagttctttagttcaagtttgattctacaccaaactaggtattttcacactgataagtcaatcacacccctgggccttagcatttgttcagatgctaggagagttagctgggtaacccatctctaagcactcaggcaacactgctgatctgtgatgctgggtatgtaattaaatggccttcccattgatcagggatatcaggacagagattggaaacttgaatgggtttgaacacccgaaattacttcatttttagcaaagtgtttctaagtggtagtcttggcatggttcctgcttgttcattatgcttcttccatttcattgaccaccaatattttcttccttaggcctcagagatacctctttgcttcaagctcccatcagtattacatttctgtagactctaggacctagagagatcagacagtgctagagcaaggagggcccagcatgggttttgtgcctttttcatcaaaactataggaaacatgctgtttataggcataggacaagggtggtggcaggaaatggggacccatggaactctctgaaaggcacaaactatagccctagctcatagagctctacttggcccacagggcattggacattgttgtgaatttgttaatgtttaaaaatcagcaaagttcttataacagactaatttctaacttgagagctggaagatccaagaacaccagccttgtctccctgcacagttccagactgtggatcagcctcatttaaatgacttggtagattcctgtagacactggagtttgcatttgtattctaaaatagtggcagtcaatagaaacccaatgggaatcaatagtactttttcatgagagaggactgagaacaactttagggagttggttctctcctgctgctacgtgggtcctgaggatcaagatcaaactcaggccatcaggcttggtggcaagtatccttatccactaagtcatctcatcagcttcaaaatttttaaattgttgagaagccacattaaagaacatgtgagagcattttcaatagactatttcatttaacacagtatggcctactctttcttcattgagaagtcaaaaaattattaataaaatactctattttttcaataccaagactttgaaatctagcccatatattacactaacagctctgagtcagaactagcccatttaagatctcactagccacctgctactgctgtatttgatagtgaaaggcaatgtgtggctgagggtgaagctataggtagaaataagaaaatatatttgcttcagcattatgtatctcttgataagcacctactcaattactgtccactgcaccttatagtcagatatgggcttcatttcatctgtgagagttagagacggtagctaatgtgcccacattcatgcagttagagagtagaagattggtatttggggatttgtcttaaaaactcaggtttagactggtgtggcggcacatgtttgtagggtggtagaggtaggaggatcaatcaggagttcagagccatccttgtctacttggtgaatttgaggacagcctgggctaaatgagagcctgtcttaaaactgtgttttaaaaatttcaacaaaggaacaacaaaatctcaggttttatctatgcttttgaaaaaaacataggagtcttatcaagtaagaccatggagcttaaaagctgaaaatcaggatttgttttttcttggtttttaatgatggttcactcatctgtagactttggcgatcttcctgcctcacccatactgggattatagcatgcaccaccttgcttggctctggaaaagcagttgtgagggtttgtgtaaggtactgtatgccaaggacataaagatgaactgggatattgatgtcctcatcctggggtgtcaaggagaaaagcattagtttaaaacagagggaaagagctagcctggggtgacagaaaatgacaaggaaggaagactgtgaagggactatctaaattcagggtcctggaaatttcttccacttaaagttcaaaagaattaaaggaagaactacagggtatgtcaaccaacaccacacaggccacatctggaccccaattcagacaagtgtaaaaacatgatccttgtggggaacagaaaggtggttgctgaattgataaaggatggtgttcaggattgtgttaaaatttaaggtccaccaatgatactgtgttggctagaaaaagagtcgtattttcatgatacatgataaaatatttatgagtaagatgacttgctcaaaaataacactcattgatgtaaaccgattctaaaagggtgagaaatgtgatagtgggcttagagtcatgagactatctttagactccggcattgccacacactgcaaagacaagaggaatagccaaggcaggaagggcaggggctctgcaactgacatctttatagtccatccaccctgtctgtgaccactggcccaccagaagaactgccgattcaggcctggaaacattccaaaaggatgcttgataggtgcagcatctatcacaagtgggatcaaactgtctcctaatctacagacccgtgacgttcagacaattagaggtagcattgcctcaggtgcgctttgcatctatagagcattctaatgtggtgatgtctaagtgagtaacatttctttcactgccaaatacgcctcccatcctgtcggaacaatgtgctcttagagaacacagggtgcctagagatgacaaccccacagaaccccgcaagtagcctcagacttcacacacatccttgggaatgggaagtgggtgtggggaagcgatcccagaccacagctcgacaggaagcagctggcagacagcgctggttacctcagcagaatgtatggagtagttgggtggcagtttttccaaggcaactgggagacaataggatccggtttgaagacgttcatttaagagaatcggcagccactgaaacagatgatgtcaagagcagagtggtttttatagctgcacataaccctggcgatttatctagctcagagccatcagacaacactaaacaatgattagatattgaccaggtctcctggcagcagcagttttcaagccagttctttgcattgtaaattccctgagagttcctgagatggtaatgtcaatgatttgctgttttctgggccacagtagtagcattttttttaatggctagtattagctcctgtctgaatatcaatgttcattttacctttcatgttttttaaagaaatagctttttctcctggagagctaataatatatacgaagcacttaaatttggaaataacagatattgcaatgcttttttcccccttaaataaatgaatattcattaaacccagcagcttttcatttgaggaacctgtcattctcttagcaaagacattcctactctctgctataatccagactagcacattttatagctcctcacagggagacaagcaagagaacagattgtagactctctgcagggaccttggctccatcaacaattacagggggaggcagcaagctgaaagcaactcaccgaataccccagaagactttctcccgaggctccttgcttctgctggcagctgatgtggtagaaggtgaagaggaggtggtgattcaccgtgagcttggcagggagcttaatttttacttcttcataaaagtcgggagacctgtattaaaagcacattggacacaaatctcttaggatgactccctgagtatgaggcatagcaccacccaccctctgttcccgagcacctgtgtgctgtgggcttttcatttactttatcctgctcctaagctgtaaggccttgaggccaagctgagactatgagaaacattccacctacataaaaacactcacagtctgaaggctttgttagagagaaaggactttacccacacagtgggaaaacacaacttggtctgggaagagcatcctcaggttcagagtgctgaacctgacctctcttcctgtctcagccccaagagaaggcctggcatgtggctgtcctcatcaatggactatgctaagcttcccatgtgttacccatttagtccccatggcaagtgtttacatgaggcccctaaggagtctacttatcaggtgagaggaaaccatacctgacatcacagagatgtccttctcaacctgtgacatgtgaacaaggttagacagacccatcactcactttactgatgcaaatgaatagaccatttttcctttggttggcttaaagtaggttaggggaaaatgacgagatgaccaaagagagctgggctttgcttctggccctctttggctctcaaataaagtgagaaaatactcttcttcacttcacactaaataatctctttaccaccatttttaaataatcaaataatattcaattcttaaagatcttttcttcctcaaagccttattacttacaaaaattatatattgccaacacagaattctaaaaagaatataaacttcttctgacacccagtccctatgttgcaaaaactgttgggaaaagcactcacgaagttcaaaaccaaacccctaaaacctgggagatatttaaataattgcagcatgtgttcaagactctaaaatatactcacttattatggtatgtaattgctgtgtacacttcctgcaggaattcaggtccactggacttcccaaagatgacctgtttatcaatgtgaaggaaccaagttaaaagtgacttttgactctatcaaatcatctgccatcacatcaacaggatactatgttctcagagagttgtagtttataagttaggggtaagtcctacagttggcatgatcacacagactaaatgtggggatgaagactgactagtggccaagggcacaggtgtgagacttgaaaaccagaggtcaccttactgtctcagtacacagacataacatgatgacatcacattcatttgtccttagtgagatactaggatcttttcccctctgaggagaaggacttggccatgtaggagattgtggtctccactgccctggccccctgtgtgcagatgcctcctggggtctgctgcagcaccaacagcacatgatttgactagtggacttgctcttgggcaaaagaagagccttttcctctagatgcagcagaccagagaccagggccagggcttggtgagtggagagctggctgagatttaccaccactgtcccctggctgaatacattggtcacacacagggtctgcacatacacacctggaagtcggaatggggaatctgccagggttagggcagagaggacaaggggagacctccagaccttcctttccttccaagcatcccccctcttccacctctcctgacactgttgcaaaaggacaccttgcatcagagaacaggttggaaggaggggtgactttttggaaagtagatatatgaggaaaggaagtactaggaaattactttcaccagaaaaggatatgaggcaaaaaacccaacacctctccctcccttcactttgtgctcaggcatggctcccacaacccaggagttccatacatgctaaacaagggtcctattagtagctgcaatcttagctgaatattgtgcaaatagtaatatctaaccaaccatgtccaactagcaaatttgggcattttgggcttcttagataattctattctagtctgtagtattggtttatagtctgcctcaggataaaggtccatttctgaaaggtgttgaggtggtgtcattattaataggctatggctcatatttttttttgtaaatggtctcacactcaccaaagagcatatgtggaagaaatttagccaaataatgagcaatgagccacctcaccccctaatttgaagagtattagaatgacatggctccacgggcaatgtggagagaccctaccagaccgttcagtcccttaaaatggtcttcagttccaagctgtgacatctcacaacggcatcacttgggaaagagacttaaggcagatgccatttccccaccatcatcctagggacaattctggactagccagaaaggtctctgcgtttgttatgtaggctatgctggaacagaatactctgtacgttgagctggatgcacctcactggtaaagcatcatctaacatgagaccttgggtgggtggtggacatactgagaacttaagacttcacccctgtgaactgacaaagtagcgcacagcccaccaaacactatcctctccttactggcatggcattgctggggtcttctccacacataaactggatctttattgtaatgttccgggcagatgctagtttgttagcaaagttcagtctctgtgggtagacgtagagaagatttctggaaaagagagaagcagataatcaataatcaatatctagagtccacttctgctcccagaccaatacctgaacctgaggtctgaggcaaggctgttgagctacgtcatcacctgttcctgtggccctggccatggtataccacagtagcatctcacaaagaccatcgagatcagctaccacctcagaaagatatttattattgatgtctcactagaaaagagtaaatgagccagatggtggtggtgcacgctttcaatcccagcactcaggagacagaggcaggtgatctatgtgagtctgaggccagcctcttgctttgttgaaccttgtttctctaaagggaggggaggctcattggagacaggacgaatgagagtctaggagctggtagagttgtggtagcctttctaggccattctggcttcacacagtagcatcactaccctgactcagtggcagctggcacacccctgatttttgcccctcattttaagctgtcctccttcctgtccccttgttggctcttactcctgtctgaaccgaatatttcttacatccaagtgaaaagaaatgtaaggcaataacttgaatttaatttcaaaggacagaatatttaatgagcctacccaggcaagcagatgatggatcatggtacaatagaaggattggcttagaatccaggggaattcgggttgggaggcacctagtgcaagccaatgttttataagatgagaaaatcacagccttgtgagtcagcccttgagaggcagaggacccaacatccattgtgtcttctctgccctctgctatctcagtggtacctgccaatctggttcatcagtcagagtaaatctgatacagttgaggcccaggtgccatcaagactggacactggtatattaatgcactgaagaaagttgatgttagtaccacaagaagtatgtgtccatacatgggtatgggtgcataaagatgcctatctagggagtatgtacacctctgcccattgttcattcttgctcatctgcactgtcgccacttttataagaggattaatatgtattgagcagtagagataggatatcctgaaaagggttaatactggagccagggagcagagattggaatccatttttgcttcttctacctgcatgagagactttgtttctggaaatttagactttgcaaacctcaaagggactaataagtgcaccaacctataggtttggtgagtatataaacccagtattcaggaggaggggtatgggttctgctgcaagtaccaggccaacctgggccacacagcaagagaccctatttcagttagagggaggaagggagagagagagagagagagagagagagagagagagagagagagagagagagagagagagggcaacacccttgatcccagcttttgagatgtaaaggcaggcagatctctttgaatttgaggtcagtctggtctacagaacaagttccaggacagccagggctacacaaagaaaccttgtctcaaaaaacaaaacaaaaagaatagaaaggaaaagaaggaacttaattaacgatggctattacaatgatggtttcttccacacagcaggcaaaccagatgcaccctccaccctcccctatcctcatcctctccattccagaccactttcacttatcatttggagcatagaagttctttctttcactcttgtaaaaccgtgtgtgtgtgtgtgtgtgtgtgtgtgtgtgtgtgtgtgtgtgtgtgtgtattttatctgaacatatgtctgtgtactgcatgtgtgcctggtgcatgcagaggccagaagagggtcttagatcccatgttttggagctatagatgcttgtgagtcatcatgtgggtgctgggaatcaaaccggggtcctctggaagaacatccagtgtgcttaaccacggaggcatctttctattgtagcagttctttctcaattcactttgttcccactcttcccttataaccagctactccttacacagtcccaagaagggtctttgaaaatataaacagcatgtgttgggtctctccttacaacgtttcctaaacttttgctgtgggtcttaattgacttggtaaagatttattcatatgtaattgttttgcctgtgtctatgtgtgtgcactgtgtgcatgcctggtgttctcggaggtcagaagagggtttcagatcctctggaatgagtcatggatggctgtgggtgctggaaccaaacccttgtgagtcctctgcaagaacaacaaattttctttttttgtttttgcaaaagacagggtctctcttcataacattggctctccatcaactatatagaccaggctgaactcaaactcagagatctgcctgcctcaacctccccagcagtataccaccacacccagaacaaatacttttaagcaaattcttcccatgacctttttttcacaatttctctgactttatttctcattgttttcccacactgaccttgtttatttgtttgtatttttttctcacatggcacagttctttcctgatatctaactgatctaacgcatccccctgcatctgtctctcatacacaaatacaggctcatgttattttatagtcacatcgttctatccatacatgcttatgaaagtaatatacgactatggatgtattatgtgcacaggttttcaccactgaatggctgaaaagcacagattagtatttgataccaaagtattcttctgtagaagaaaacagcaacctcttgtgagagctttgatttccctaggctgtaagcacctgagcacgtgttactttgtacccatgtccttgtttaatgtatatactgtgtatgtaattttatagcagcttagggaaatcttaagctttgattgtggattttggaagttggggacagaataattgaaatgccctatgactcagctctactgctcccaaacattcatctaactgtaccctactacagatatagtcgctcatacatggtcattgtagccctatgcacaatggcaaggaaatggaatgaacccagatgcccatcaacagatgaatagataataaaacatggtatgtgtgcacaatggaactctattcagctgtaaaatatgaaattacaaaaatcttcaggaaaatagatgaagtataaaatatattaagtaaggtagcccaggctcagaaaaacacacaatttttctttcatatgtggattctagcttctaaacttatttatcttaaagtttacgtgagagtgggtgtaaacagaggccagagaactctaaagggaacccttggagatggctgggtaacagaacatgtgtatttaaaggtggagtggggagccaggagatggagaagtaaaactatgtatgaaaatagctaaaacaaaaactcagctaagtctatgtatgaaaacactataaggaagtctgctactttggaagttaataaactaataggcaaataaaataattaaaacaaaacacaaaaatccctctaggaaacaactagcagaccccttcaaccccacataatccctcacccttgtcaagagaacactaacattctcggtgttttggcctttgtctactgagagtaaatacatttcttaaggtaaaaaagaagaaataattttcttctgtgttcttcgctcctacccagacatacgtgttgatttaataacaaactagtgatacagtctgcattaaagcagatgactagtcctggatcctcccagtgtgacaccacaatggcctcacatagaaaagctctctgcttcctcagagcagcactgtggccatttcaaacactttagctgtgttttaaaaattcccctatgaagccttcttggcagaggcaaagctgaagactccaggagccatttgctgcggtggaaatgcaggtgagtccattgtacctaagagaggctctgcttgcaaagagaaaagcgggtgcccttcagctcttcagcagccagagggcaggactgattctgcagagcaaagctccaatgtctactaacgtcagcctctgcggttagctgatggcttttatgcaagcattcaaaagaaagtggcaatccagatacattatttaagcaaggcaaatagccgaggaggtgattttggtttgccattcatacttcacttccagaaaatctgtctgagatgtaataggagtagctgacataatttcacatttactatgcacaggtgctgcccctcagtgtcggatagaagcgttagggttagggttttaaatacacaaagaacagattaaaattggaaatctcagagcttcatactggttttaagttttgacagttgttttaggtagcgctcattggtcttgaacttcccggtctttctgtgtcactcttctgagtgccaggaggattacaggcaagtgtcgttaggccctgctttcagagctcagtatttcctgtgttgtggaattactcagaaaaccggcaaacctaatgtgtctgtattttttaaagtggaagtatgcattgcaaacatacacttataagtgcttcgcttcacaactctgtcattgcctgtggaccagagaggaacaggaggcaaccaacaccaacttcacctgggagccagccctgcaggcaccgtgccctacatagtcaacttcaagacgcactggcccaagagaattggtttgcttttaatctgcagacatatgaagcccagtggttgactgtgatcccccaccaccctcatatttaggctttactgctagaaagttcaaagtcaaatctatagctcactgtttgagaagttgacaaaaacctttaaaaatttttgtgtatcaactttggccaggccaagagtgatttctcttcctccatttttcctatcaatctgtagtggtttcaagtgagaatggccctgaggctcatatatttgaatgtttggttcccagttggtggactgtttaggaagtattaggaggtgtggccttgttggaggaggttgtcactaaggctgggcttgaggtttcaaaagcccaaccaggcctagtctctttctcttgtctgtgggtcagaatggaagctctcagctactgcactagcctcatgcctgcctgtctgcatgctatctgccatgatggccatgaactaaccctctgaaactgcaagcaggttcctaatgaaatgctttcttttaaaagttaccttggtcattgtgtttcatcgcagcaatggatcagtaactaagacaccatccctataatctacctctgacacgctttcaaatcacaaggttcagacacagctacataaacacagagcacttactgtatcctgtgagcatgggctcgtcatcattcctagtgcttatttttgtttagtgttttatgttaggtcaagtgcaaacccataaaggactttagtgaaagacaaaaatgggaaggaagtcctgatatgtgggatgaagggactcagaactcaggcaagaatagctaacagcttctcaccgtggatggagcttatgatgtgtaactggagctccttctgttaagtgaagtaagtcatacacaggagcaaaagtatttcatgctgttttcttatggaatgaacacacctgtgtgcgcgaagggaagggtcaggaaaaggcaatggggaatgaacatggttacattataatgatacacttgaaaatatggcattgtgaaactggttactagtatgcaacaaatagacactaataggaagagaaagaggatgaggaggaggaagagctttagcaaccttgctgatccacctcccatgggtgaactgatttcagcaacttagaaaactgaaatctgatgagttaatagggggcctatgtcaccgctttcatggtacaaaaggaattgtcggctcagttttgtgtgttgtctcagttggctcagtgtgtgtgtgtgtgtgtgtgtgtgtgtgtgtgtgtgtgtgtgtgtgttgtatgcatatatgctgaggctagagaagaatgtggacgtcctttccaccatattcctctgagacagtgtctcccgtctctcccctgagccccacccccaccctgaggttacagttgtctacctggctatgcctggctttttggcacaggtactgggatttgaattcaggtcctcatgcctgatagcaagtgcgctcaccactgagctaccactccagctccgccccacccctacactcctcagcccagccttagtttaaagtttgaagaaaagatgagaaatgtgccttgggagtttctcacaactaaacataattattagcctcagtgtggaaatccttcaaaactcaatgagtcattaagttgaggtcctctgattttgtcctttattaaaccatcatactatttataatgccatgaaacgttgcatagatctgaactcacattttgaaagtttctaagcaagaaaaaaaaccccataaagtaaaggaggtaagattggctcatctcttgtagttttataatctccctggtactttaagctagtgggaaaatgaattttttttaacttaaaaaagatacatctagtcagttagccatggtttcttacactgggtctgggtctgtagctccatggtagagtgtacagtaagcagcagcaggccgtgactttcctctccatcacccaaaataagagaaaactaaaactaaaaagatattatgtacactgtcaaaactcaggcctccccgcactgcggttccgtgtatgtgggttttccactgtggtgtttagctgcccctcccacccacatctactcttccccttggaaaaccatgacacagcagctcacattttgccccaattcatgctgtgaggagccaagggcaggcagtctgagacctgaaaccacgggcatccattaatggagagctgttaaacgcctctgctctaaggagaagggtggatgaatgatgattttggggggcctcaggaaggtagatgggaaagttgaaactaaggatgaaaacacttaaagataaaaggctcctttccccctcccatatcagcaaaagaagtaagagagaatagtcctgaaggctaatccatccatcggaggaggattagccctgttgaaaaccagtttttagacaaaagaaggtgcacattgtaaccccatttaccggggacgcagaggcaggaggctcacttgagcccataagtctggagccagcctgagcagactagtaagaccctgtctggaaacaacgatgacaaaagccaacaaaaacacagaaaccaaagaaagatgggctcctggatattagggtgtgccctctagtctagaccaaccactcatcacagtgaaatacaagcctggattgcctccatttaatcacttctccatatctgcagcttcaaccttaagttatatggaaagagggtgtattgtgaacctcctgctggattctataaataggatctatggggggtaaaaatagcatttgtcaccattaaatagcaagacttttagttagaacagtcattcaggagcagcaactccaaagcatggcagacttagatgagcctaaaataaggagaatgttgggagccatggactatagaaccaatgactatgcacacagcacctctttacatatggctcatcactgcttcaccttcacattccctatagttcagtttcctataccaggcagggtttgtagaaatgtaagtttgtaccgtggaccactgccccaaaggggactccactgtgtgtcattggatgcataccttgacccctcccactatactttccaaacaaagtgctaaaggctgaaaggaggcagagctggaggtgagaataaatccttttgcaaaaacaaaacaaaacagaaaagcaacaacaatctcttgggggcactcggatagtgcttacttttgcgtggtcttgtattgatgaaagattttctaatgaaaacggcagctgcttgccggaagagtccagaagtgagtgtattgtgccctcaagtggctggatggtgtactaaaaccatagccgaggactaaaataacagtcaaggctgtgagtaaccttaggtcattggctctcttctgaattttttccattcttagaaaagagaagattgttgtgcttgggagcaactcaccaggatgtgggctctgtatgactgatttacaactaagcctgagttggttctagagccaggaatcattttgtttccatttcttggctatttcaaatggcttcatttgcctgctgctcacccaaggtaaatggtttgttcataaagttctggtcactgcttgctaagactagtaaaacaaatgctggggcttcctctcttaaggcagagttctccaaacacttcttcaaaggatgaaaagcaggaaactgtccaataaatagacatgcatgaatcgatatatgttaagatattccattataacataaccatagagcaaacggctcattagcgcaagagtaactaagtcaggagaatgcacacaaaagggcagctctgaaaaagcaagagattctgtgcattcacaaaaagtgctccacacacccagctgctcaggaggagcaggtgggggtagggaggggtggggtgtgaggattatgctcgttaatgtgtgacaggataaatgcatatacatgcatttcccgtctgcatgaaaatggctgcctccaatggtccaagaggtctgagatataaagcataccctcttttcatctgtttggtttgctgttgtttccttggcaaatatatacatatagaagcccgttcctttgttttagcaggcactgcaagcactagtttgtggatcgttttacacacatagacaacctatttccaaagagaggaactatggggatggaagtcaggagtataatgcagaattttctctctgtctttagtatccttaatatttggaaactttggaagtggttacctgtttcttaataagtaaaactcaaacaactaatggaacaatgaagaatggaagtgcctttgatagagatttaagtaaagcattctttttaaggagagttaaatagaaaagatccaaactttttataaactaccaagagcacttggtaattgtgccagggtgagcacacagacaagggaggcttcacagcatgaaaaccaccatcctcatgtgaaagtcgagctgttgggctagagccttctaacagacagacacacctgactacaatctaggtgcatgctgggattgcttcccaaatcaagcagatgacagggcatgcctatctaagtcatgacagacctttggatgactctgtagagtggagaacctaactgagggtagattcagagggtaaaaccactttttagcaaaggacagctcctggggctcctgagtagggccctccagaatgagactggacactgtgtggcatgcccacacttctccacacccagcagtgaagagattcactctagaaacaatgataactaaattgggaatctatttcattgaaaacaatcaagtcccattcaaggacatgtccagtgttccaattccttcagagtactttaggtttgtttcctaaggatcctactaattaaaccctagcaccctgatgatcacttggactcagccttacatctatcctgagcctttctcttctccagcatgcaaccctcacagcatccattaagacttcacaggatatgcaaggcacctccttgttaggccagatcagactttctggtctgtgaacactcggctgaataggaggaggcctggaaacagctaattatccatcaaagaaattgtgttccgactgatagccttgttctcagcaagcacagtcctccaaagcagtccgataattagataaacaagactttggaggctgggctgagagatgaaaattcactttatgtggctttctttaatgtaatcactagttaaaaggtcggcatggagttaacaagctcattacaaatgcttcgcctgtgatctcagcacacacccccatggcagctaccggataagatgcccttgaaggccttgccgggactgggccccaactcacactgtgtttattctgctcccaccacaaggcagctggcacctctattgccagctgttgggcatcaggaaaaacaggctatgagtcaattccaatgcattcttaggcaaacagctagtctttaaaaaaagaaaaacaaaaaatcctggccatggaaacaggaacacaaactgagacttggatagtcttttttgtcaaccttagttttccacttttggaactgctgtaattctcttggagacttctcagagctgcttgcctgggtcagtctcaaaggatacctgtctagctcggtccctccatagaggttggacattggtactgtggactaaatccatccttcctgccagtactgagcaggttggatggggtttcagaagaccagggtccctgatgtgggctacccagtcacttttgggaatgatacttctcatcctgtaaagtgatctcagccatctgagcaagtgttcattttatgcatacccaatgcctgggaagcctgagcagttctgttaagatgggttttggttgggacgtttcttcatagcaacttgaatagggtcgagggacctgggggcagggtccacacaggatgcaggaagaatgggccctggtaacacataatgagcttgacgaagacattgcagaggcacagccaacaaaggtgttccctgaggaggtggaggactggctgaggtgggtcaggctgaggactgacatctgccattagaccatggtgatagctcccttcatagtgaacatgactaatccatccccaatttctggctttgtcaatggaagcattcattgtttggcacaccacatgtatctgttctttgtaggttacagctatatagagtatttgtaagttaagccttatatcacattcctgagaataagttccaaaagattttatccttgaattgatgtccacattcatttccttggatggtgtagtgacttgaatgagaatgtctcccctaagcttatatgtttgaatgtttggtttgcagatggtagaactgtttgggaaggattaggaggtgtggccttgtcagaggaggtgtgtcactgggagtgggctttgaggattcagaagcccatgccattgcagttaacattctcttcctcgtgctcgtggaccagatgtaagctctcagcacatgaggaccagagaggaaacactgaaatttaacaccataagaagtttagacaaaatgttttctaaattcccttaagttgtcatgtagcaagattctgagacaagtttgttacatctttctttccataaacatgctatggagacacagtatcttagagctaagaacaggcctctccttcaccaaactgaaaagaagtgccttctatcacttctgagagtgaagatctggttccagcagagtggccttgaccatcctatggtgtcaggcacagccaaagaagatcagcttctcatttgcaggcctgcttctcaggatgccatgctgggtgcagagtaccagcctagacttgttctcattcccacattctgaacggctcagtgcacagacgtattgcaaatcctgcactgatgtgattaagggataatgtctgcagtaaacgactcttgcaggagattaaatgctggggggaagttgggtagctatagaactcatttggggcgagtttattcccatgccacaaggttcctcttccaattacaggataagatttccacagcatctgtaagcaaacatggtcatgccttcatctgcctccagcgagtggggaacagaatgactgtctataaatgcttcgctcttccaggagggagacccaaggctgagttggtgtttaaaaaaaatgaggaattgcttcagaaaagatgacttgggggacctgtgtcccccaaacaccagaaggaagagctccatttcttattgtgtggcgtgtggcacctgagtgcatttctcatggtaactgtttacttagtgcactagtcacctgtcctttctaggcctcactttagcgaatctgtaagatgcatgcatgttacataggaaagagtgggtgaagaactggagagacaggagttcccatatactgctaggaaaagagataacctttttgtgtgtgtgtgtggggggggggagtagcaatgtgaatgcaactaaaaacaaatattattacttgtaacccagtaacttcactttcaggcatatttcacatatattcacagagggacaagacaaaaaaatctgtcactttgcaggactagtagaatacacaaatgttgaggctagagagatagctcagaggttaagagcactggttgctcttccagacaactcaggttcaattcccagcacccatatggcagctcccaacctgctgtcactctagtctggaaaacctgccctcttctggccttcatgggcaccagacatgcatgtggtgtacagacacacatgcaggcaagacacccatatgcactaaactaaatttaattaacttacaaagaaaaccacaaatgtcaggctggggagacagctcattcatagacatagctcataaggccaagtgtttgccgagcaagcacgaagacctggacctgacataactcccccaccaggtgaaaccccaagcatggcaccatgatcccaacactgggaaggcagaaacaggagaaccattgagcagacaatctagactaatctgtgagcctaggtcctagtgagagatcttgatccaataaaccaagtgggtagctcctgaagttgacgtctggatcacacacacacacacacacacacacacacacacacacacacaccaaaaggcaagtaaagaaaaacacagatagtgaattggataaataaaatatggcctctctagacaaatgaataatatacaacaacaaaccaatatggctctacataaatcaatactgatatttaaaaaataaaaattgttcagaagttcctgctggttaaactcatgaaaacacaactaactcaaaagaaaaatgagcagttgggcataatgcatcaggttaataacatgtattaattattatttctcaaaagagaaaagaaaataaccaaagtacctaattcatagactgtgaggtccaaatgaatagaaacataacagcatcaatacgtacaggtgtgtgtgtgtgtgtgtgtgtgtgtgtgtgtgtgtgtgtgtgtgtacacaaccagagacacatgaaggaagggcacacatgatcatgacagtagttactgagcagggctgtggtttgaatgtgaaatgtccctcacaagctcacatgtttgaacacaaggtccccagcaaatggtgctgttttgggatgctttatgatatttgtgggggtggaatatctccagaggaagtggatcactgggagccagccctgacttcctgcctgctttcctcttggccatgctgtgaggaggtgctgaggatgcccagttgttcaccccttcaccactgagacacataccatccatcatgccttccccctaaaatgggctgtatcccctcaaaccgtgaatcagaagacccaaccttcctcccttccttaagttgttcttgtctggtgttccgtctcagcaacaaagaaagaaagcatcacaggcagtgaggcaaaggaactcaacatggggataagggtgactttgtgagatcagtaagacttgattgggtattttatatgaaaatgcaaaccccacaaaatgttattcacagacggtggagaaaagatgcttaatacggcattctccccccccccccatttcaaaagcaaaaggcatctcaaaataagcaagagcacatgaggaacaatgttctggatagatgtgtgctgtcaaatgccccgtcaagttccctaaaagggtcaggggcatgagatcccttgcaaagcagagcaaccttgccttgagtcctacggtatctcactccttgtcatccagtctggtagtagtcacttaaattaactgacacttaaattaactgaaacaaattaggatggaattgttatttcctctattgcattagcctaatgaccacatgctaaattattgggcagcatctggggactacttctgtcaccaaagtaagtttcccagacattgctgagttttcagctgaaaacctgtgttttgtttggtgttgttctgcctttaatccagactggccaggggctcatcatgaagcctgaagcttgcttctggtttacagtccttctgccttaactttctgagtgttgggactaggcatgtggcaccacacctgtgtaaaacccttaggaaattatgacattttagtcatgtccctcttttccttaaagtccttctgcatggaaggaagtcagggtgataggttcgttttctttctgtttttctttttctccatttctggtgagaagacatctactaaaatctgttacaattatgactgacaaaaatgcatccttgctgcagagaatcagacaaagcatctctaagaagcgacctcacaatcctctgtagttccaagccatcacatttagttttcactccaacccaggaagcaggcaaaggctgtgtttggaggagtgtattatccaaacaagagcccacatttctcacctgtacacagtgtgagggacgtacacttcccttatgggaaattccaagacctccttgtgtggtcgtgtccggttctcgggaaagggtttgactggcagcatctcaggcgtcaggcagcagttcatcacatcaggagctgaggatacctccagcctaagtgagcctagagcaaggcacagggagggtggggtggggtctttactggaagaaggaacccaggattactttgctgggtttctttttctttctttctttctttctttctttcttttttttttttggtttttcgagacagggtttctctgtggctttcgagcctgtcctggaactagctcttgtagaccaggctggtctcgaactcacagagatcctcctgcctctgcctcccgagtgctgggattaaaggcgtctttgttgggtttcttccaggaggataagaataagctgtgggagtgtacgtgtttgggggttcccagataatttcctatgcctaggggaaagcctgtcatgctaacatttgagattaacatttcataaaacaaaagtagggaattatataatgagaaggaatggactagaacagtggttctcaacctgtgaattgagaccctttttagggacaatcacatcttgtataacagatatagattataattcataacagtagcaaaattatagttataatatagcaatgagataattttatggtgggggtcaccataacaggaaaaactgtattaaacagtcatagaattaggaatgttgagaaccaccagactaaaaggtccacaccacagatatagatgttaaacaaataaacaaacaaacaaccacccccaaacttcctggtattggtagcagtaaaaattggtgggctttgggttgagttctcaggcacacaaggatggtacagaaatatcttatgggctgttgctcaaggataagaaagtgtcttcaactgccaaagcatccagctctcttccttaaatcctagactttcatataatattttgtgtgataaaggtctggtgatctgttcgattattaccagattatttgatagaccaagtctaaagcatattatatgtagaatgcatcctttgtgaatgagaaaacagtaatagatttgtcaaaaatgcagagcaatttagattcttaacttcaaataaaaaatctatattgcccttggcagttatgtaaaattaaagtattaaacaagaaatgtcaatcacaaatggtttgggcacagttcaagagtgtcatagttagcttctgttgacaacttaacacagacacacagtcacctgggaggtgggaacctcagctgaagaactgccacgatcggattggcctatggacacttttttttttttttgattgctaattagtgtgtgagagcacaccccaccgagggtggtaacactcttaggcaggtgggcataagctgtggaaggaaggcagtggaatagaacctggatgcaagccagtaagcagcattcttccatggtccccacttcagttcctgactccaggatcctcttgagctcctgtcctggcttccctcaaggatgtactacagtgtgacgagtaagccaaacaagccctttcctcctcagttgcctttgatcagtgttatagcacagcaacaaaagcaaaccagaatgaagaggcaaagagaagccaagcacacctgggatggatttgactcttcgctgtaaggatgaagacctcttgtagtcagctaaaaacttgaacaaatcttcatcactaaggcgatctccctcctgccaagagatgctcaggattagtgggaagactgctgattcctggacttggggccagctatttcaaagacacccctcccccccaccaaagtcattttccttaattattattttgctcattccttctctatttctttatttccccttccctcctctctctttcctctcttccttcttccctccctccttccttcattcctttgtctttcctgaggtatggtcccactaggcagctaaagctgacctccaattcacaaccctcctgtcttagtttcctgagtgccaccatacctggctcatctgttttattctaataagtctgtaatagaaatcaatgtgacgggcaactctgaaatcaacgaattcaaccaccactgcccagcattcttggaagccaaactctcatcagcattgctggaggcagagctcccacagctttcttaggcagctgtctgaccttgaggaaccaaggtcacaggcatctgccttgtaatgtcaactggctgaaactccgtttagtcccagaaacaatgctgaacaaacttccttcttcagagataccaagatgggaaaagtatcttcatagtcttcacctttgtcttcaataaggaaggcaggtgtaagctctgccctctacatgcccaccatgggacagatgcctggcaaggagcacatctgcatgtcctctaatccctgcaacagcacagctgagcagataacactaattaacttctctgatcacccactatactgctcctttgaactgtaaccattctcgataatacaagacaaattcagctgcactgtaacacaaatacctgcttgaagaagatactagtagccaaagtggtggttttgaagttggatccaactccattttcctccaaggagagggatctctcagaaggcctcctggattgggacaaactccttcgctcacctacagagtttctcccttaaaggaaaacaactgtcattctaacatgttggaacagacacctgctattgctgaccccagccatccttgtgaatgcaattttacctatatagggttcaacatttattaatctccctcctaaagtccttaacactcttactagaggagatgacggtaagttcttcctgcaggagaacagagatagccagatgttaccctgcaaaagtctggaattcaccagttgaaggtctgctgctaggctgttgagtcagtccagtgtctgcctagcattccctgggagggtacatattctcccacatccctgaaggcgctagggactcaaaccagcttgtgcacattctggatctcctttgcctctgttctagtgtggaccaggtaacagaagagcctcgactgacctttctaatggaaactagacagggctgaggctctccaattattgttcccttatatcttgtttcttctgaagaaccaacctgaaatcttgtgtcttttattctgcaaagtctagggtttctgttataaatagtccattgcctggagtgcacagctcttgactgtttgcttatgtcaaattctcacactgaagctgagtgagggtcagcactggctacctaagctccatgtagtacaccaagtcagggttgggcaatcagctcaagttaaactatccctgacttaggcctagctaacatcttggcaagtcctctgctgggattgctgggattactcggattactcggggaaggccatgccctctgtactccccacacttccaagtaagtcagtaagtagaacagccgcattagaaaaactggatgtgaaggtcagaagggctgatttgtactgacaatggcaaagaatgcaggagttttgactggtgattatgcaatagtctctccaggagagtagcaacagtaacgatcaccctggcctccactcccggcaaagggcaacatttcagaagtggcagagccaaggaatgtgggaaacttcccaaggtagactcaaatatttgctgaatgcaaaggggtttaggaaaacagctactccaccacaggcattgggcatgggttcacctgaaaactaatatcacccggacacttccacccttaaactgtagaagtaactgggtcacatttatggagagctgatgaaataaatgagaacagtaattactggttatctttggtacttattctcattgtacttggcaaaataactgtaggagaacagaaattttgctgagaagtctgaggtttgcttttccaagttttaaactgtgtccattctcctgcgtgggagccaaccatggtgtctttgtctaacacactgtgcctgctcaccacttgtccttgttattttcaagtattttaagttttgagacggggtcactacagaaaattaactttttaaagccttaaaaaaactccacccaaagttcttaatataaaagtatatttaaggctccataaatgctcatagtgattgatcagaagctcagtgttctatttacaatcttcctcccacctacctccacactcttttgttctctgaagtccttactaatgagcagataaccacaaagctggtatatggggggggggctctacttccgttgcagatgggagatcttaccaaccacagtctccatgtcattgctctccctttcaagggtggagacgttgaagaagcttgctaagctaattggggcccaggcgaagggcatccggtatttccccaaacgttggcagaaggattcagcttgaagttttagtttttcaaccttttctttactctggaggaagatggtaagagttgtcgttgtgatgaaacaaaacatcagcaccaagtaaattgcctggcatggggacaacaataaccacactgaccactgacggggtgggggtgtgatagtgagtcaacaggaaaacaacagcctaggctgaaagtctagctgacaaggaaacaaaggttacagaaggaagagatttttaaagggacatcaatcaattagcagatggtattttctgctatgaagacatgccctcggcttgtcataccagccaacacacaaacgcttcatttacctagataacctggattctcctgagaaaaacttgggaaagaaatgctagtatgtcaactatcaaagtcccaaaagaatctacctcacaaaagctgccttgcaattctaaaacgagccttaaagattcccaacaatgtcattgttgttgacaatacttctaaggggttctcccaaaattcatactcacagattttaaaacacaaatatctgtctttgtttagtccaatcaattttatttgaagtttacaagactgattctaaaaggctacatttaaaaaaaccatcctgggaacttttgcaaattggtactggggaaaagtcctattcctggctttatgacctattgtgtactaattaatttatgatgagcagaagctgtagctggtccccatctgctaatctgtgcatgataacaagacaataccctgtgctgttgaggaaaaccaggggaactcttgtccttttcttcttgtggggccttggcagtgctcccaatctgtgtgcagccagagcctcggaaccaaggcaacaggtgtagcccagtctgagcttgagtccacactggcatgcagcatcattagtgtgttcagtcatatatttctttaaaaaattattgtcaggtcagtaactggtttctctttcctctttgatgaaaatacaacttactagtgtttcaaatggaaaagataatagtataccgccattaactattttgaggaacacttttggaaatttgttcatcctaagatggcaccagtacttagatgaccatacctttccaccatcactttctttgatgaccatgtagggttctgcacagtctgcaatctccccctgctgaaggaccttttcaatctagcaacaagaataatattaaagcaaagtgagtgtgttatattcatataatggcatctatgctaccttaaaattattttaatgacaatatttgatgacacagagtattttatatatgctttctgattttaatatacaaaaatacagtgtggagctggatattggtgatatatacctttaatctcagcactcagaaggcagaggcaggcagagttcaagtgcagcctggtctacagagcaagttccaggacagccagggttacacagagaaaccctgtctcaaaacaccagtatgtacgtgtacgtgtgtgtgtgtgtgtgtgtgtgtgtgtgtgtgtgtgtgtgtgtagtatggagactaccacagagtttcagaggagaaaaaaaaggaacaagatatattaaaaagatggtaacagcaaatgataatatgataataaatttttatatgataggaatatgtgtgttttgtattttcttcctattgctgataagaagtttctattttaaaacaataaacatgtgtatatctacaataaaaatgcaataaaagttattttataaaacaaagcccaggagacacacgtaggaagtaataagcttattttctttattgttgcttacaaagtataaaagagatatggtctctgtaaaagccaggctgggaactaaaacattccacaaaatgaataaatgaacagaataaatcatctataattgtgctccttgtatttcctgttagggctgcttctctagatttgatagacagaaggaaatgccttaaaatgtgtgttttcttttgtttgtttgtttgtttgttttcaaagacagggtttctctgtagttttggaggctgtcctggaactagctcttgtagagcaggctggtctccaactcacagagatacacctgcctctgcctcccgagtgctgggattaaaggtgtgcaccaccacccccgctcgagatgtgtgtcttcttattctgctaatgagtgctggtcctatcaagcgtctacttccattttgactcacattaaggagctgacaatcaattgtcataaatatgggcaccacatttaggggaaagaagggggaaattttgagatgttctaattctttactcaaagaaaatctaagtgaacttaggtgctaagacttagctctatgagcccacgtcattagtttagattcctgaagaagaaatctgttcaacataggccatgggcacacattcttaatagacaccattgtaagtgaggcagaaactacttgaatctgaatatcctactgatggaggtatgttcaatggtgtttcaaaagaagtggcacagagctgctcaatggacagtgacttcaggggtttgtcgcagcagaaagtctctttttacaaaagaggtttaaaagctcatcccattgccagtggcacaagagaaggttggccctgagaaatgaagcacactggaaacatgggcggaaagggcttgagtcagaaactgaccagtgttccagatcaccagcattcatcccatcattattcattcaaaaagtgtgtattgtggtagctgctggggagtagctatgaacacaataaacatggctcctttcccccccaaactctgcagaacaaactgaagataggttaatttttccgtgaattcaacagcaacaacaacaacaacaacaacaacaaaacaaaaacatggtcttgtctggtggtagtagaacacacctttaatcccagcactcagcaggcagaggcaggtggatcactatgaattcaatgtcagcctggtctacagaacaagttctaggacagccaaggctacacagagaaacactgtgtcgaaaaaccaaaccaaataacaatagcagaaacaacaacaacaaaacacatggtttttaaaataaatcttgagtagagattaagactctttcagggttggactccactgggattggagcccagtggcacagcacttactttccatgtacaaggctatgaagtccatacccagccccaagggaataaaggaaggtaggaatggggaaaagaaagaatagagattggaagaagaaaagggcttgggtaagaaatcttcagttgggactctacagcaaggaatggacatgccttggctttatttgaaacccaaagaaaggctgctcataatctagaaccaagagagtctagatctgaggggaccaggaactactatccctcttgctgcactggaccagggtgactttataaggagaacttcagtttgatttgagcacctcatacatggtccttcctggctgatgggtaagcatgcatgaactagaatatatgaatcctcatgtgtgtaggcatgagcagaggagcacattaggaacagctgagagtggtaaggttaggaggctactttctagtatactcattaaaccaggagagacaggtttaatgtctaccttatcaattttaagcattttttataaagcttgagcttcacacccattctcacttgtagaacaaatcctttcatgcactcaaaatcctgaactaagcttttcagcctgaaagaatccctcacagtaatttatgtgagagctgaactaggtgaccttatctatttgagatcttgatgttcatcttgggaacaaaaataaaaaataaagtgagaagccctttctttatcacacaacatctacctgggctgactaaacattacaagaccacttactatgaatcagagggaaggcagctataacaatggtcttagaagacaaagaggcaccaagctgaaaatgctttccagtgtaggtctaaatttcttaattatatccagacaccttagaatgtgtttgttactgtcaagtcagtacacctctacattaaaaaaattagaaatgtatacacagtggtagggaccaacacatttctattattagttaattattgtaggctaataaaaatcaaggagagttggaaatacaattagctctagaattagtgtggttttgttgattgcacattgagagaactgtatatttaacaacagggcagtcagagctgaaattaagcttccctgtgtgttgaattaagcaccacagtgagaagcaacagatacaaattcttagcaaaagatttattttataattttattttccttttcagttcttacagatgaaatccaggacctggtacctgttaggctagtgctaccgagatctgagatccctgaggtatgccttccagtcctagccatggattttaaacttccagaactttaaacaggtcctttcaagctttagtcatccttgtgaaataatataaaggaagtactctccaagttacctgaattgtttggaatctgtaatccactactattagaccacatgggaatccaagtggtacaggtacaggataccaagttaaatgtcccaaacaaagaagtctgatggttcatgagatcagacacctgtgtttacctgtttagaactgtttacagatctttgtcttagagagtcactaagtgcacttatttggctggaggttgttgaatgtttgctgtcagattcaaactaatgactttaacacgtaaagaaaaagctctggtcttcgaaaatctccgtccatggacagtctccagtgaagtgtagtctatttattttgtgaagcttatttataaaggacccacagattttgatcactggacacatgccctgtgataacagagagtgaagggcagaaagtgcagccacatctcaagttgtctatccaaggctagattggggattgctgtcctgtgggtcctagagaaacatgctaacaccaccgtgagactatctgagagcttttgttcctctcaccatggcaaccttccacatcaggacagctgaaggtgacctccttagttaggaagggccaggctttatctgtaattgtgacaactcctggaggtcagtctcatcatccttacagcacagatgacgaactcagtctcagaaagtctgagtcacagcaggccatacagtttctgactgcccaataaggaccacaaccaaggactgtagggcctccaacccctagttagtggaaagggaagtattgctgagaataaaacaacctaaacatcacagaggacacacaggcctgtttgtggcttctttcagctttgttgaatcagacaacaccaatgtcagatcatgctgcttggatggtgtgtaattaccttgacaaccaggtagatgtctgaggatgggtaggtgactgagaacactgcagacctcgcctgactcgatgggtcgactgagggggtgtgagctcgcaggaaccctttgaactggtcagagttcaggtcacagtggaaattttccgagatctgtaaataagcagcaaagggaacagtaagttagaactgttgtgttcttggtctaaaatcgctacaagcatgaagagtctctgggaaaatttgctcaaagaagcacaactgtgaatatggtgtatggctagtggctgctagaaagtctggtattttgttacaacttcaatatagcctggagccatttgagaaaataatttttattaactcaccaatatttcctgtgtattagtgatgtgcaaggtactgccttgaacaggaggaaaacacagcctctgcctgtttacaatcaaggtgagggaaaaactaacacacaacaaactagagtaaaagcaaattaagccactacactcatgtacagaagcaccatggaagttctaaagttctagaaagtataagaaaattggggtaacagggaaaactattcatggatgagacactggagacagatgagtggttctcacatcaacgatcagcctcacacacgtacatatatgtgtacacacccacaaatacacatacacactcacccatgcagcacacacccctacacacaaacacacacacttgatatgctttattgctacacaaaagcgaggttgaaacatgaacccaaagattttattttcataccttttttctttctttaacatcatagagggcaatactggcaaacagaggctcaatttcaatctcaaacctgtcagagagagagagaaaaatcaatatggttctagcctggataagtgtgaatgttctaaaagtgcatgaacatataaaatcattaaaaaacgtgaacatgattccagaaatatagggataaccccgccaatgcgagagacacaaggatactaatggggaaattatgagaagtcaatggaaaattccagatcatttgaggtcatggtggagagcttggtggtggtacagcaagagagtgagttgaatggaattctggtctaatccaaaacactacttcatatgcacgtcatgctggggactcataaatgccagacaagtagtctgccacgaacctacaccccagccccaacagtacttactcctattgtagctgttatttctttaaagaatagtctctatctcacaggcaatggacttgcttgtgttgatattaaatctcactatttgggagatggaaagatggctcagcagttaaaagcaagcactgctcctgtagagacacctagtttgatttccagaatcaacaacaggaaactcacaaattcctataattccagttccagaagatctgacaccctcttctccactctgcaggtaactgccctcttacgcacataccctcctccccaacatgtacacataattaaaatataaataaaatgctccaaaggtctactattcaattctaaggaataagactttttagatagttaaaaagtaccaaaggcctcgagaaatacagtaggataactcatgttcaacaggccaacctactacacagtgatagcaaactccacctggcaaggctgtggagtcactgactgtagaaatcagttgatcctgtctgcaatttctctcacgagtcacttcatctcttccctatgaataatagctttgggtgattcccacgtgtgtgtgtgtgtgtgtgtgtgtgtgtgtgtgtgtgtgtgtgtgtgtgtatgtgttcatctcatgaaaatattccatcttctgggcacatatatctatgggaagtaaagaggatgactcttcatttggctgtgtaatcttgatatatagaatatatatactgcatgctttgtcttctcaaaaaggtcccagagaaaagaatttcttctcattcgggtatcagtagtaaagagcgccccactgcttaccctgaggctggaagcagcagcctccgaatcttatactacatagccttagcttttcccttggatacagcactgaaaagtcccgtttaaccagtgaacatttgctgaaaatgctaatatggatcaaatgccacccagtttccttctccagctgaggtcagttgccatggctactgtgacactgtattcccagccacccttgaaagctaaagcaaaagccagtgcgcagaaagcacaaagctacagtgtctcttccccttttttctacatttatcaattataagcttctagcttaaccagccacacaaatgtagttttatgtactaacaccccttctcccttcttagaaatcacaaccccttactccattagcctcttactctgtgcatggatggtgatagttgtacaacaatcttgcactcaacaccactgaactacacatcaaaaatggtggattttgttacttacattggtcgcacacactgcaaatacctattatcattctttctcttgtcagaaaaatagcatttttttccttttttcagttttttgagatgggggttttgttttgtagctcaggctggcactagagactagtgtgatccccctgcctttgtctttttagtgctgggattacaagctgagcccacatgccaggcagcaaatagaactttaattgagggtttgctgtgcggtggttctccatacctcctgtattttaaccatgtactgtgtgatatgctaaggttctgagcactgctgtgtgatagttagatgggtactgagtgttaggttcttgtggtccaggggagagtgctcctcacacatgccagcccctttcctcttcacactcctgttctacagggaagggaggtgcagaggtatgaagtgacctggcaaagctcacccagctaggaacttcagaggcaggttgcaaggcaaaggcttttcctgcattgtttttccaggtgtggtcctcagacaccagtatctgaggcaaccatgcaggagttctgggtccctccgggacctgctgaagcagaatcccttctgggagatggctatgggaggcctgcattaagaccactccctgacagtattcagtgtacattaatgttctgatgccaaagagagtcctctgaatggaggtcactttgtgtatgagggtattaaattttaaactaaaagattcccctgcctgaaatactgttgtgggatactttgatcaaactctgacactcccaagactgcccaataaagttaaaccttgaatcagggggcagagccagcaactggctaaccagaattggtcatagaaaagccagaaatttggatagagaagacaaacaggaaggaaatggtggagagcttcctcttggttttggggatgaggaaagagatgtgttttttcagtgcctctggccaaaaagcaaggtcagctagttgctacttagcctctcagagctagcaggttttcaccccagcctttgacttctgagtctattcataagtagaatgatagacacttaatttaaacctacaaattatggtcacagcaaagccagggctgcaggacaaaagcccttccaggcctcagcctgagtggcctgcagggcgctgacagaggggccatggggtggcagatgataattaaaatatcagtagattcatgtgcagtcgctaagatgacagaaaaacatcaaaatacaaaacagaaaaatattccatagtcactttttttcttgctactcagaatttgcagaattgacaccactgcaattcttttttctctgtccttgaggctttatctgcttccaaaaggaaagtgggaatgatgacagagatgaaaacttttttagaaatttcctagctaataaactccatggtattgtagacagaatttcacatatcaacatcaatggtaaagtgtcttctatactgttgttagttttactattcatactttcaaatttaaaatttcttttttaaaatccagtttatagttaggatcatttctttgatttgtctcttctctcaagggtgtacaaatatgaacgccacttaaatcacttgaacaggccaaggacattggctactcatatcagttctacctaatctatttaatttctcctttaggacctgggaaaacattagaaactggcttgaaaattctcattaaagaaactcaagtgactccatgttttttaaataattcatgtctagctcagcaggacaagtttcccaacctgtcagaacagctgctgtggtttatgtactagataggtctggaagacttggtgacaatcgtccttggaggaagttcctctagtcccagagacaaactcacagcatctaaaagtatagcatgactgagtgtatcgtgggggtgagtgtggcagagagtagtgcagacttcctgaacacaagtataccatgggggtgaatgtgcagacaaaaggctctgacacccaccccgaggaattggctaaagtgaaaggggatacaacaaagccagcactggtcaatcagtgcatgagccgagggacagaacccgagagacgaaacatcagaatcacagggtaggtcacctggtctaatagcttcattttttaaagaaagaaccaaattcccagagaagatgacggggtggaaacacagaatcccaatgtccatttacaaactgggaactatggaagtgagcctcacgatgactatgagatagatggccttactgtgtgtgaaaaatgcttggcttatgtactctcctcagcaggaaaccagggccttgcatatgctaaggacattgtctaccactgaggtaaatacctcccatatttacaaaaaggcctgtgatgtgagaagtagaaaagctcatctctaaagtctgcagggaggaagagcagcttgcaggcactcttggggagcacacagcaatgtgctggggtgcatgaaggaagtaataccgtatttcacttacttcattctttacattttctcacttacgtacattttataatgaagacaatattttaatatgtcaatatttaatattttaatattttaataaattaaaataatttaattttaattttatgtgtgtgtgtgtgtgtgtgtgtgtgtgtgtgtgtgtgtgtgtgtgtgcacgtgcgtgtgcgtgcattgtcaagagtttatgagcaaacatgaactgattctggagcactgctggcttcatttattgtggtgttagggaattgtgctggctaattttatgtcaacttgacaaagactgaaaggagggaacccaaactgagaaaatgtcttcctaagattgggctgcaggcaagtctgtagagcattttcttaattagtgattgatgggggagggcccagcacgtcatggttgaggccaccccttggcaggtggtcctggaaagaaggccaagcaaatcatggagagcaagctggtgagcagcactcctctgtggcctctgcatcagcccctgcctctatgatcccgccctgtttgtgttccttccctgacttcttcagtgatggactatagatgtggaagcataaaccaaataaatcccttccttgtcaatttgcttttggttgcggtgtttcatcaaagccacagtaacccaacttaagacagggatcaaactgaggagctcaaatttacacatgccaggaaagtactctaccacctagttacagctccaacctatagttgtttttcttaatctaggaaaattaacaattaccttctatgcctaacttttctagacacctgcgtttgctacatatcatagaaaattggttgttaaaggtttggcacaaatagaatccagatctagtcaactctacgctctactctttctattagctcaatgctcccttctactgaaaagatgctgggagaatcttcccgaggagggctgatgattctggcatagttttatctaaaaagcaaggtggacatcagtacagtgtgtttggtactcacttcagagtcagcactttgaccagtattctgttgcccagatgttccttgggacattccggcactggacgtatttccacagcatcctcctgttatgatcacacagtaaagaaatccttagcaactttccacggggctttgtgattgcagtaaagcccgagaggaagggttgccctccttgttcctgccttatttctaatggcagaataattcaagagagagagagagagagagagagagagagagaggagtttgccatccgtgcatcaacgttcaaagccagcatgtacatacagtaagcatccatcctctcggaaatggagcacgtgagcatctaagagaaagagactggggaggaaggaaggaaggaactacaaacatagctgtggaccaggaacttctaccaggctgcattgcaaaaatgtacagctctagcctgtttccccctctgaagctccaaatacaccttcagaacacttctctttccagattttcttttaaacttatatttactccatgtgtttgttggggtgcctgcttgtgtactgtgtgtcacttcatggtaactctgtacccagtttggtgggataatccaagtggtaaactccccatagctccaccctccctccccaccccatagctcccatcgctgagggcccaggtggcatcctggaaccgctgacttcccttcagaggagcggggcctctgaagaccagctgggactttcaagattcccggagcagatacatgtgcagggaagacccacttactagaaaagatatcagttatgtatttctaacagtggctttggtttgaattacaactttcagaatcttctttgaaatgagctccagttgaggaaaatttaaatatatgttgaagtagatagagttataaagtgaaccactgtttatgcacacgtggtgccaacttcggctcaggccacctgttttgtctatatcctcccttggcagttccccacgcttaatactgaattatttaaaagcaagttcccagggttggagagatggctcagaggttaagagcaccgactactcttccagaggtcctgagctcaatttccagcaaccacatggtggttcacaaccacctgttatgagatctggtgccctcttctggtgtgcagatacgcatggaagcagaatgttgtatacataataaataaataaaataaaattatatcatttttttaaaaaagcaagttcccacacatatagtttcatctgcaagtattttagtacacatgggactttttaaaatatcaataataacaatgacctaaaaactaactacaatttcttactgtcactaaatattttgcatcagtttgttaaatcaggatctaaacaaggttcatattcatgctttacttttagagaatgcatttcctaggcttcctgtatctgaatttactgaggcttcacatttatcagaaacaggagataaaaaccccagtcgcacaaggaagaaatgggatgctttagtggattcctgaggttttcatctttctgagatgtatttatatgtatctatgtgtgtaaaaacatgtgtgtacgcctatgtatgtgcctatgtgtgtatatacatgtatatggtttatgtgtatgtctgtatatatgagtttgtatgtttgtgtttgtttatgtgtatgtataggtgtatgtgtgtgtacagtataggtgcatgtgtgtgtatagtataggtgcatgtgtgtgtttatatatgtgtctctttgtgtttatgtatacatatatgtgtatgtacatatgtgtatgtatgtgtatttatgtgtgtatttacacgtatgaggtttatgtgtatatatgtatgtgtatacaagtttatgtgtgtttctgtatgtgtatgtaaaggtgtatgtgtgtgtttatatgtttgtatgtattgtatgtatgtgtatatgtgtgcatgagtttgagtgtgattgtgtatgtgtgtatgtttaggtgtatgtatgtatatacaagtgtatgtgtgtgtttgtgtgtgtgtgtgtgtgtgtgtgtgtgtgtgtgtgtgtgtgagtgtgtgtaaaagagaagagaagagaaggaggaagagggaaagcatgatagtcttccatttattgatcccatggatccagcagccaactccacatttggctccctaggatttggttatgagagtccgtgagtacagcctcctctttttaaagtgttttttagttgggttccatcacttgtaaccaagagatggcagtcaactcctccgtgatgtggagtggaaggagggaatctttcctggggattgacacagaagatgcccattacaggaagagtctgacccaggaaagggcttgcacggtgaaaacttggcagctgaatcccactttggtcttttctacagactcttaaaatttcaacaaaaggatttgcccttctaatgttctttatttggaaacaaaatagtagtaacataaaataatcttattagtgttctattaaaaaaatcagcatttataatccttttagagcaaacagaattcacctctgttccacgggactttcttggctaaggttcaaacaacaagcacaaacatgatttctttgagaacaacttcaaataataaagggtgggtgtagaggctctcaagcattttacacattccagtttacaagtagctgccatggtaattacacagcattcctctccactcaataaaagcaggtcactgggacctgagctaagaaagaacgttcagcacccatctgaatttctgcattgtctcaaaaaccataaaacaaagatccttcaaaaacagtttatggttcattctctgagtcaagtcagactggaaatcctcctattcaatccagggagactctgatggtgaatgtctgactcatcctgtcccttcctgtactttcttctctcatctgatgtcccctttagcctctctctctctggtttgcagggttacatcctagctgtcctagaccaggctggttttgaactcacagagatctgcctgcctctgccttctgggattaaaggtgtgtaccccactgcccaccactttagtctcttatgttacatttggcatccccatcacagaaataaacagaaaagggagaaagtaaaggccacacccgtcagatttaatattttttgacaaatctcatattttagtcttaatgtggtgaataaaagttgaaaagttagaaaaactgacttttaaaacatgtctgtgtttcagtggtatgtgctagtgactgggtcatcatatacaggcatgtaagccaacataaacattgttagggcccccgcttttagtttacttcacctgctgaatcttgaacatgatgcttaaatgtttcttccttagtttctaattcaaaatatggcaatggtaatattgcccacattcttcctaatttatttttaaaaaatacttaaaagtgataataaatttattcttatgggataaaatgggatgttttatgcattcattgtaggaagatttgtatacattactttgccaaattttctttttgtttggtggtaagaaacttaagtctatttttatgaacaacttaatatacactaccttatcattaattgtgttcatcatacagtaaaatccagtgctccagtttaactgaaactttgtctcttttgatcaatctttctctcctatctgtccaaccacaggtcttagttatttcctttctattttctatgaaacagtttttacatgccccatatacgaaagatatttcatgtgtgtgtgtgtgtgtgtgtgtgtgtgtgtgtgtgtgagtgtgtgtgtgtgtgtgtgtgtgtgtgtgtggtgtgagtgtgtgtgtgtgtgtgtgtgtgtgtgagtgtgtgtgtgtgtgtgtgtgagtgtgtgtgtgtgctggcacacgcgtgtataggtgtgtgtacttggccatgtgagccataagtcctcattaggtttcttccttaataccttattttgagtgaaagtctcacactgaacctggactcatcatttcagttagattggcagagcccccagaagcctctatttctgcccagggctggagttatggatatataccacatgtccagtgtttatgcaggcgctgggcagcaagcactttccccactgagccatctccccagccccaggacactcactgacttatttaaaggagagcaatccttttctcaatgtgtcagattgctctccattttttccatttatttatatatttgtgtgggccgggggtgggagctggtggaggccagagaataaccttctggaattggttctctcactgtataatgtgggttctggggatcgaactctggtcatctgtcttggtgatgtgtaccattgcccactactccctctttctggtcccaagatatttacttttaatctgcttcatatgatttgaagctccagacaaaactgcaactaagataagtagataagaaaccaagatgagccgggcggtggtggtacaagcctttagtcccagcactcgggatcactgtgaattcgagaccagcctggtctacaagaactagttccaggacagcctccaaagccacagagaaaccctgcctcaaaaaaccaaaaccaacaaacaaaaaaacaagaaaccaagatgataggaaaacaaagacagaagagaggagcaactgagggacctgaatgtaagccgctgtgttggctggtggggatcagaaatgtgactggcaaggaattctaaggacttgagggacacttccccttacatactcctaagggtggggctggatgatgagcaggtcactgtcctgtctgacattgccacagtaaacttgatgctgcatctccttcctgttgcttcgtgttgtccctgcccccctcccacagacctgtgggaagtgaatcagagaaggctgggtcacaggagcagcactgcacagggacaggtcaggctttctgatagcttgcttggtccgggaaccaaatctcaaagatttacatccatagacaggtgcattatttttttttatacaaaatttccccaaatcttattcatttttactatttgtgtgtgcatgtttgtatgtgtacacctgggcacgtgtgtgccacaatgggtatgtagaggtcagaggacaactttgtggggtcagttctctcctaccacttttatgccaattctagggatcaaactcgggtctgcaggcttgcagagcaagcactctgtctactgagccacctcgccagcccctaggtcttagttcttgcaactgaactttctataaaacttgaacagcagagatagagcagctggctgttctggcaagacctggaagtgtagggaacctgacatgcaatggtaaaggctgaaaacctcacacaaaacaaggagccaaaacacataaggctccaaggatggctacctctcatgtcatccaaagtgactccaggcaacgtctaaattgctctgggccaacttcagtaaataaagagtgaacttgattaaataaaaaggtgggaaaacaggattctaaagcttcacacacagggagcatggctgtgattatctctgcccagagtatgttcaaagcaggtgttttcatgtgctcatctgggccactggggggatgggggagggagggttcttaacaccaagcttttaagtaatgtgtgtgtttctgatggattagtagtgaaacacacccccaggtaattggatggttggctctgagcgggactctgtacacagacccttgaaatgtttagaggattaagtgctatttctagttattgttgtaagaatcccatcagtataatgatcagcaagcagctctgtgaaaaacagtgagcaccctgacaccctgacattcacacagttctctgcaggggcagagagcagaaaaatgcttcagttttttgttgtcgccaatattcttgcctatggaaacccgcacccacctcgtccacagatggatacagggcaaagagctcagctggtcgattggtcttgcgggcctcctctttcttcttctcaaagtcctcagcactgagaagctgcagcaggttttctagccgctcatcaggctgcaggctgcggaggtcgaagtcacaagtagtgagggggcccttctcagacacatcacacagcacttttaactgacggggtcctgtctgttagagaaaacaattgactttcatgagggtctaggggcacacatgagaactaggctcaggggcaattcaagactgctctagtggggtctatagaatctcaggtctcaagaaggtttttttgttttgttttgttttgaacaaactaaggacttgacacaactggtcttgtcttcctgactatcctgaagtaaggtgctctttccttggaagcatgccattattcatcaggtagacaagccagtcctgagcaaggatttgaaacaacattgtgctcctagtagttgttggctgaagctgagtctcttgggaaccacactcacatctcagctcagagccaaacagagttgggacaaagagactagacttcgaacttagtcaatttcagagcttgggatttaaggctagaaaataagatgaactcttaagagccttcaaaaaacgcatagacactcaaaacctgaatgttaagtttacaaatacagatatatgggattaggggtatacttagtcactacagcagagccagtgtgaggctgggtgccccacacaagtaaccacaggactttagtaatgactataggagcaagcaccaacaaagaaaaactgcatgggctactcaagcaacagcttacagctgcagtgggaactcattcgcctgtttgtcttctcacctacacatgagcccaatggactagcacaccaacatgtttggatcatggctctattgttcacatttctgttgtaaaacacaattagtgtaaaatacatcatctcagtcatcttttggtagagttaagtacatttattttataatacaactagcctcattgtccatcttcatgactctgcaaaactgaaactctacacccactaaacagtaactccccatccctccccagttgccaggcaaccacatttgatgctccactcttccacagtggatacctggattacttccatctttcagctactgggagtaatgcttctgtgttcatgggtgtatacagcattgaatcataatgtagcaattttatgaaaataatggcaacagcaataacagtagccagcatttattgtgtactgggcttgttggcatacgtggcataagtgaaactgacattgttcaaaatcttctgactcactcactcctcaagtaacctcatgagatacttagtaccatccttggttttcagggaagaagaaaactagaacccagaaaggttaatgatagggcctggggacagggaggtgttgtgaggggatcaataagaaatgttaggcaatctgacagtgaaggctttgaatcaccctggctctaccagggaggggcccccataggtccctcccccaactacaggcccttccttcactttttccatcttaatcactgtgctttggggtttctatttgaatacctatttctgcagctacaaaccagtttgaggaaaatggtcactgactcagacagtagagttcctcctacttggatgttctacgagtcttacatatattctagtttttttgttgttgttgtttttttaaattgacagcctgctttggaaagagctaacctgtcacctggtaaccatgtttgttgataggaaatacctgagcggccggttcactgcactccagagtttctgactcaaaagtctgtttctgaagagtcttgtgaaaatctctccgtgatccagttttcttaaagctgcaaaactctgagcttccttggtttctttcattgttgatatgatttgatttggagggagatggcgagcaggagagagggaggaagaggcaaagcattagattaaaaacaaactaatgatgtaagggcagacaaagtcatagaggagctttcaacagaggacaattgtaatgcctccatctaattacgctcccagactcacacaaggccctgctgtagtgacatacacacttgccccctggctggccactatgaaaggcaggaatggcctgggaaaatgccactgtagaggtgtggtcctttcagttgtgggacacttggctccaagctgaagctaaactgtgaccatgtaagaagctgaaataaatctggcaatgtgtagaagcagcaaatagagattgttcgaagatgaaaatagaggaagccatttcatctccatgtcaatgttcttaataatgagtaagaaaagcaggacatggctaaggaaaaaatatacaaaaatgttgtacggaccaacgttctttgttaacattcccaatcccattctgaaacttcactaactctgtcaaagggatggactgtaggtcagtatcagttgtagagtgctttcccagaaagcagaagggcctagattcactggtgtgtgttctcctgaagaattgagaccatgatgggaaagatactcttaagtcgtcatttcataactgcagaaaccaatagtatattccccattttttttaatgtctgagagaattcttgggaaacatgctaccaagtgtatgcacacttaattggtatgctctctgcatttattgtaaagactgcacagttggtaaagggacatgtaattaggtgagaatttattaggtaggtcaaatggcctacaggtaaagccagaactgcagggaggccagtgactattcaaatatagttcacaactctctgagagggaggggcaatgtaggaagagtgtgacacacacagcaggtaccaagggcatgttagttcattgtattaagtaaggaagcaggagatgccccagtgcctttggttgggaggtcaggacatctctagatgttactgtgctcagaagacaatttgttttgagaaaaagaaatacacaacccagaaactctctgcagagcaacctggcaactattctaagcttggcttactatgactgaccaccttcagtgtcccctggccatctgtacccagcccaatctatagtaacgagacttggtgaaaagccccctgaactaggaactaaaaaagaaggaaatggccataagcatacatatttagaagaaaaaaaaaaagaaaagtgtctataacaatttctgatttggagttcctaaacagctgaaaacaaacaaaaattaaaatatatatcgtattattcaaaaacatcaatgacaaaagtatttccggggatgtcataaaacaacagttgcttggatgtaataactattttaaatatttcagagaattctttttgttctagctgctctgaggttgcaaatgaatactggattataactgaacaacatttatttttataaaatttactttcttttaatagagttctttggggaaagacctggtgtgggatatcttaagtctgccaacatcttgaaagttattctcaatcatataactctggggagccacatggagggggatgtcaggccttcttggtgcatagaggggggaaaaagctgggtgcaagacatcaagatggctcaaacgggtggtgcttgccctcaaggctttagagagcagcaactcctgcaagttgtcttctgatctctgcacagctatggcctgcacacaaacacccacagttacaaacaaataagtaaataaaaaaggcagtgggtgatatagtccgtcgcctcacccatttagccacactgtgtgggtggtctaatacctgggaagagaaaacaacctaactaaagtagtggcaaagataggcaagtaagaagtactgtcttgtaattagatcccaagtgagaatgcactagacctgtgcttattagctctgtaaagccctatgagaagcaggaaaacaagcccctcagaagcacttctatctcccacagtggtgtctgcagatactttcttaggactgtcccctccaaagagaacagattcaaaagggaactgttataagatcctttttaaggaaaacttgggccatggggagtgggaggtggggactcgaggagcagctgatctaaaggcctgaggtgcagccactttagcaactaggactatacctacgttaacatgctcctgccccaacgatctcataaattacacctatttctaagagtgtttacttacaaacatgcaaacacacacacacacacacacacacacacacacacacgtatgcacacactaacacacaacacacaaatacaggcatgtgcctgctttcatcatgagcttcaggtcatgtgtctgcctgaggtgagggatggacatgggtaaattcgaaggtactttcctgaatcgaatttgtgatttgatgataaaaagtctacatactatagcaagcaaaataaaatctgatttgttcttctaaagaccctttaggggatacagaattatgccttttttctgttttaaacaaatagatgcacccaccccttccattttgttagactgtcttgtggagttctttacaaggatcccaaaggcattgccaaaccagtcaattagaggttgatggtaaagtcacactttagccccatactgatgtcacctttgtgacttttgctatggaaaggggtaagactagtgtgtccatgttagagtcagaacaaaattttctccccttcctcataccttttagcatccacttccccatcttaaaacctcagaaactcacaattgctccccttggaagcaggggtaacactggctggggagaggcagggactggcaagcacacgaaaggtgactcattcccaaagtgccagcatggaagaagccaccgctgggtaggtactaagacagctggctcattgccgttggctacaggcatcccagcctactcaccccaccctggcaacttacttaaccaaaaccaagttcccagtgagcctgtgtgcagacgggagaaagatgggagagtaggcagactgggagaacaactgtccacaggaaatgaatacagtctgcagcttcccaggagaatcacatgctttgtcttaaacactctgctgacacactcagaaacaccaaacactgaggacttcatgaaagcattctttttagaggccagaatgtgcagcagggggaatctggctcttggatgggaagggcctgagttcagatgctggctctttatgaagaagagagagtcaagggagaaatctgggcaggtggcctcatgtctttaagccagtttcctcaggacaactgaagctcattttaaggtcaattgtgaagatcagcgaataactgtgcccttttccctccctctctcctttcttctctccctccctcttcctcctgcttctcaaacaccctctactttgcttcttcttcctatataattaagcgttaaaacctccaggtgtattggaacaaggtagccacctatgtctcagggtggaacgtagcctcagaagtccagaattagaacttgaatccaggacagggtaaggaatgcatttatcatgaaagtgctgcctgcatggtgtggtgaatcagagcccaaatggtgcaaagaagatgtcagagcatggcagcctggcacatgctcatcactgagccagagtctaataaagaagcatttataagaagggacacctcaagatcccctgagcaaattgagagcatgggaagagcggggagggagctacgagaatgagaagggaagaagaggaagggtgcagaggtcatgagggagcagaaaggttgagtcaggggaagaatagaagaaagggtatgtggtaggtagggttttagttgggggggatggtaggggaggacgggagggagaagggaactgggattggcatgtaaaacaatcttgcttctaattcaaataaaaaaaaaatctgagaaaaaaaaaaaaaagaagggacacctgacatgaggtgtcagactcgggctcggtgacaagaactgtgtcggtgtcggtgcaagctaaaagaggctcacccaggcaggaatggcatggctggtttcagaaccagaatagtaggaggagggagctacattttgccaaagaaaggagttaaaaagcaaaaggagaccactagagcagacaccatgaagatggatgcacatgtcaacaagaactcagttttcactctattcagtgaaaggactggaggagcaaaactgagcatgcttcacacacgcagcttggctgctgagcactactgtccactaaggcacagcggcatctgagagccatgactaattctgggggaggaagggtaaaatccaacagttcctggaatactgagtgtcagagagcaaggctatcttcactgactgctggggccatgtaaaaaaagatataaatgacagtcaaagagactgatacctttcaaactgtaaaccattggaacatctagagttaaatcgttcaataaaacaggaaattatagctccatattgatagaaacaaagtgaaggtttgatgaggaatgggatatcctaacagacctaaagggtggaacagtctataaaatagctgaccctaatctcaaaaggcagggaagttagaatacacacagagaaggtcttccagcatgaccaagggcatgtgacatttcagtgcaccgtgaagtttggaactgaattcttttgctctccaaagaacattctttggccatttgatgaaaacagaaatctgaggactaagtagtaatgaaatattaatattaattttcagaatgtgggggtcagatggcaactatagtgaaaaatgtccttatttgtagcaattacacactaacgtagatgggcaatgggaaaatcaggctaggggtttggtctcacatgtttaatggttaggaagaggtcttggtttatgtttgcaatttttctataaatttgagaatgtctccaaagaaaatgaaagcagtatgtcaggcacctggcactgcagtaaaaattgctagggctccaatcaggtccccgttatcaacccatgcaccaattctccagctgctgtgagcataggctcatctttccttcctgtctccatgccagcctattactttggcttcatggtaactgtaaagattggtatcagatcacaacagtcccacacttgagacaattttacagtctgggttttctctccacaacactgttgcagcccaaggctaactaggatctgagaccccatccttagtagacttctcttcaggttttctctaaagaccacatgtgcctgaatccctgcctcaggttgtgcttctagggtagcaacaaagacagttacatgccagctgttatcattagcctcagtgacaatactgtcccatgcaatgtcaatggatgcactgtaactccagacacttcattaatacacataattgtcttctaatatccccgtttctacagaactaccttgtttcgtaggggaaatgtacctagctagcagaaacaaggacagagttctgaaaagagcccattttagtatcctcctttataggatactacagagaccgattgaatctattgtcctgatcaaactggtgccaccctacgcctccaggtcttcaattagtccccttcctaggtgtactcctaaaactatggtctaaaatatgagatagatatttgcttgttaagtttcattcatcttaatattcaacaaatgtttctaactttcattctcttgagaatacgataccaaggagaattcataagaattatagctgagagctgttccttccctcaaggaagtcagtctactgaaaaagatgccacagttaacagcaaagacacttcagattgctaactggaactcaatgaagtgtgtgacaaaagtttcagaagaaacatcaacaagatgtttcaaaaactcacagaaggaggtaggtttctagccactccggtaaaggcttagtagaagcctttgactagggcctctcacggtaggtctggagcaggccataatgatgtccacagccaggttgttaccatgtaggctgatgaacctgacttgctctccacgctttaagaaagcagagcaccttgacagccagcacaacaaatgtgtgtcataataagcaattattgatcggggagacatttttatggtgttttgggagtaactgaattatatgcactgatgtgttcaatttttaattgtttaccagttcactgggagtaaaaatggagcaataaaacagatgataccctattccttgatatccccactctccttgagcatgaccttccggcagtatcgccttaatcactcaggatgaaagacaaacttcagggactttatgatgctgccataacacccatgaaatgtttcactgtcaccgtggataatacaccaaaaataaatagcacgtaaacatgtttaatcactggaaagtttgacttaccaccaagacatggaaaacattcagaagttaatcaaccccagcttcagttagaaaaaatgacatggaaaatgtgcttaagatccttactatccccccaaaggatgctatcaaacacacatccacacagaatgtgtgggaaggtattatgaaatactatgaaaattagataagtgaacacagcccctcacaaatcatcaagtctgtgcctattttcaaaacatataaaacaaaaaggactaaaaaagtgttaaactagccattgtagacatgaaacagaaagaaatctattcaaggactctgctagcctaagaatcacaggcaaatatttcaagtaagaggatattttttctgggcttgtgaggtggatcagtaggtaaatatgcttgctgctaagcctgatcacccgagttcaatacccaggcccgaaggtggaaggaaagggctgcctcctgcaagctgctctgacagacttctatgcatgtacagacatgtatgtacgcatgtgtgtaaaaaccagaaaaatgtgaatatatttctccaaaaggagatcatgtattatatacataattcaacctttctttactcagtgataaaaagaagtctagacctctgttttgtccttcacagtggtactatttatctgatttaaacatgtcaatgacagaacttgaatggcaaatgccctacagaatgatgggagtgggagggaatgcaaatggccgataccccacacctctgcccattaaatggaattcaaagccattatcacagagaacgaggacataaaagtctatctctagatattacggagaaatgtaatagcagccaggagataattgaggaataaaggagctacctaaatcagtgcttgactgcatggttttggatgacaaagacgtgtccatggaaggcaaaatggcttcattaagatcacacctctaaagaaagcaggctgtcacccattcccacagtgcagtaaaatatactgtgtagagtttaagggttattcccttgacatgctaattgaagtgtttatcatgatatttcactttttataaatataagcaatagttaatgtttactcaattattactacagtaatgagatctttcattttatggggtatggatgctcttgcttgtattatgtctgtccactctgtgtgtgcctggtgcctgcaggggccagaagagggcatccgatcttctggaaaaagagttatagatgatggagagccaccatgtgggtgctaggaatagaactttctacaactgcagtcaagtgcccttaaccactcactgagctgtctctgcagtccttatatatgtatttttaacacatatatattaaatcactatgtagcccagggtaatggactaatgctaaaagcctaagttttatttgattgttgctttaatatgctaacttactgactgaaacttacaaggtaagtactatgttctctctcctgttctttccttctttccttccagcaccaggattggaccaaggccttgtacatgattggtaagcactacagcaccaaggcacagctctggcccctatactcaaggtgctattctaattgctacctgcacagtgaggagacaaagcatcaaggagcaaattaatttgccttgggccttgggcaattcagctgttaagcagcagagccaggattggaagttgttgagtccttttgcccattatttttgttattgttgtttcatttttgttttaatttgaatcaagctggaaccatctagggagagacagcctcaattgagtaactacctccatcagattgcctacaaacaagtcttcggggcattttctggcttaatatttaatgtgggttggtgcagcccaaaatgggtgaagccacctttgaataggcagtccagaatggtataagtaagcaggctcagcaagccagaaagcagtgtgaattagaattcggggaaagaagctgtgtcttaaaagactaaatgactgatacaatacaatgatacaaagaagctggaatgttgcaaattcacaatcaaattacactttttcttgggctagctttagttccccattagccattcctggctgacctctgtgttggaattaacatccaactaataaataaaaatgttttggaatttaacttatcagatcactagcttccatcaagccaaaagcaaagaatgtcatcagacaatctccaaggcatgtagatttcttcccatcttgctgtaactcaccactctgatgcatccactaatgtatttttaaaataccttggctggtaactctttgttctgttactgtaaaactccacaaaactgcttccgtgttggaacattatatttgatgagatctaaatgtatgttccctggccatgatcgttcatatttgtcccagaataaaccatgtctctgattcctttgaggtaagagctgtttcttttgatcacagcagtgctcctccatggtctctgctttagttcctgcgtctgggttcctgtcctaacttctctcagtgatgactgtgataggaacatggaagccaaatgaatcctttctcccaagttgatttttggttggtgttttatcacagcaatggaaagtaaactcagtcctgttccattctaaaaaatagtgtgatcaaccacagcaaaagaaaaaaaaatagacctgctttattttgtatttctatccatcacacttgtgatatacagctactgtggtggtttgaataaggacagtttccataggatcctatgtttgaacacttgttccccagtttggtgagcagtttgggaatgattagaaggtgtggtcttgttggagaaggtgtctcactgggggtgaggtgggaaggctctgaggtttcaaaagactgggccattcctagtgttctctctctgcttcctgcttaaggaccaagctgagagctctcagggttcctgccatcatccctttgctccaccatcatggactctaatcctctgaaacagcaaaccagttaagcatttctttttctaaattggtcacggtgttttgtcacaagaatagaatagtaactatgacagttacaatccatgctgttaggagcacagttctgagttttaacaaatgagcacagcctcataaccactacttcaatgaagacaccagccaggtctacaaagtctccagattctcccacactctctgtactcaactccttcccccaactccagattctggaagccactggcctcttttctgtctttaggactttactttttctagaatgtcatataaatggaatcaatcatgcaattatttactggctggcttattttacttagaacaatgaatctggtaacatcctggtgttgcaagaatagtggtttaaaagttccattgtattgctgagtagtagcccattgtatgaactcaccagagtttgttttcttattaccctattgaatgcattcagtgttatttgtaatgttgtcacctacaaataaaaatgttacaagtacttgcacagagacctttatgtgaacaaaggttttcatttcatttagtcaactccctagagatgggattttatggtatataatggaggtatgtgcatatatatatgtatatacatatatatatatatatatatatatatatatatatttgtgattttagactaagggaataaaatccaaatatataagtcagcattcagaaaacaggtaaattaagactggagaaatttaatgtattttttattaataatatccagcattggcaaggaaatggatgaaagtggtagttccatgctgagctggtcatggagtggaattattgaagcttttctgaagaccgatttggtagaactaatcacaacatattagatacaagggtctcatttctactctcagaaatagtgacaatcatgtgtagagcagatgttttactatgtttcatcgacatgggaaggggagacagttacatagtcatcaatagaggaagatacggtaactcatggtacattctttcctctgaggaaatcaaggcagcctttcaaaacaaaaacaaaacaggctaattctttgaaacaatatggtctcaaagacattactgaagaatataatgtatgcttataacacataaaaagacagacattggtgagataggaggactatagatggagaccatggagaaaaaccataatcaatcaaaatcttgagttgtaaaagaaagtcccaacagatacatgtacaaaaagactcccacacctaaggctcagggaacattccaaaagaggctgcgaagaggttgtaaagccagaggatgagggaatttgctataaagttgtgtctcttagcaaagcgactcctgtaaagtctcaccaccatgactgcctgaacatgagctgatgacagcaaacgtgccaaagtggatgggggagtttgttgttggggggaggtgtccaggggaatagagaatggatatggtcattgcatatataattgtatatgtacatgcatatatatgtatatttatggatatacagtgtatatataattgccaaagaataaataaaaatgttttttgaaaagctgtggtggaaatatagttggaattgggtaatgaagagtgcctggattttccccatgaataaagcatcatgggaatacacaggcactcaatggttgatgggagaagaagtgtgtgctaggattgtaattttcattctcagcatttcagattcacttttaccacagaatcaaatatagcagtagaaaactgtgcccttctgtaagatactggtcaaagactgccaggaactgtcaatgagttttggtttccctctgccaactagcttgtttggggaaagggaactggtccatgacatgagtgtgctgagaactcagccaggatgcttgacacaatataaacagttactgttttcataagaggtaagtgcttctgaaaaagaaatgggcacacaaggaaacagaatatattaagtcttaaatttgtacatacaccttaggttcagaaattgtagtttttcccccccaggaaaaaataacaatactaacacagggtgttagtaagaaggacattgctgcaatgtaagtacaaacacaaaaaggatgatgtccctaaatattaaaaccaattgggcataaataattatatatatgtactatgtaatcattagttactgtgttcaggaagaataactaaaagtaaagacaaggaatcctcccttatcgggaaaattgaaaattcaggctaataaaactgtaccagagtccaatttagtatttctataaacatatactacaaagaaattttattcaaggcctctattatcaccattaattattgttacctacatagaatgaaatttatgtattttggttttgtttctctgtagtttctaaactctctgtcatgagcatgctaaagccttttttattaaaataaaaaagagagtgcactaccatgaggagggagcaagtacagtgttccaaacagaaaataaatctgaaaaccaaatttagtccaatggacctttctgtttattgttccctcttggatttttttttttttagaactgtaaatgcccagaaaagtgcctctaattataacattttgaagcttgagaacaacttgttctgaaatctctcctttataagaagcaaggcataatcttatttgcctgctggcaaacctcattttccatttgtgtagaatggaagacagattgacatgtagctgagctgtaattacttcttataagtgattctttcctctcttcagctactggaaacagtatacatactgacctcacttaaaaaaaaaattagcacagattcaatggcacacttggaggaactagataaaacccaatcccaagcgtccttttattatttatccccaagaacagtaattcttgctagtgtagggaaaggggaagactgcctttagcaaactgcttgtgtctcagaggctttctgatgagtatctagtggagtgggcctcagtctctagacagcccacagtctacttcccaacacacaggtccataaatatgcacatgcacacacaacagggattcctgtgtcccaacacttctcacaagattgttctgtgaagctcattagtatggggacagaaacgttgagaaaaaatgtcacaaaatgtttgatgtccccagagaaaaaatgctgtcttgataggaagaccagcaagtaatttattttggggtcacaaattctagtaccatctttaaatctgaggccaagtttcaattcactaactatcttttatctgggaattcatcaaaagtaaaaaagaaacaaaaagatgtgctccttttttttattattttttggggggagacagggtcttgtcatgctgctcaagttggctttgaacttttaggttcaaagtatcctcctgcctcagcctcctgagtagttgtaactggctaagaagcaattctactcatgtttagaatgtgattttttttcctaactgaataggtaaacagactgtagtatatcagtacaacataaaatcttttcttctgtgataacaggaagtaagggatgaagccacgaggagacaagatggagaaaggggaaatcaaagactaggaagaagactggtatagacctatgagcatgggggtaggagcagggagaacaccaggattcttgaccaatgagtgtgggggcaggaacaaggggaacaccaggattcttagggcagcaaaccccttttgtttgatgatgtaagaacagaagcatttcattatgcattagtcaaaacacatcaaatatgtagttcaaaaacctatgctaggactggggatgtagcccagtgtgaccagcatgagtgacgatctagagggggataggggaaatcccaggactttctgttcagtttttctgtaactctaaccatgcccccaataagtcatttaatttggaaaacaaagaaacactaacaatgcaaaatttacatttatataaattatataaaaataaagagggataaacttacttccggttcacaatcagccactctcgaatataagtctgaacacaatccctgacatgaggatccagttcaactctaattggatgaaaaataagataaaacaggttattactgagctaaagtgataaaataattccttgccataataaaggaacaaaacaccatctcaaatctgtgtcagtaagaacattagggatcttcttgcccattcattttaggcaatggtatctgttcttgggtgaaacaactatgttggcattttatgctctgtgagtttctttgttattgctaaactacatctatgctggaaagcactacgacactagtagggaggaacagctataattaagtaccaaaccaaaaaaaaaagttcaataattatttctaagagataatttttttttttgctcttatgtaattttgttaggacacatgggttttccatttagaaagccaagaacagttgtcatcggctttgatggttttgtagacacagactttagattcctgtcatacctgcttagaagtgtgtcattagagatagtctccatgagttctacagtctggaaatcagaaacaatgatagtcgaaaagcttttggtattgttagaaacacattagttctaaataggtctaaaagctgaaagttttttatttacatattttttgagattacattagaattatattatttccctctttctctttcctccctccaaactctcccatgttcttattcaaatccatggcctctttttctttaattgttgttacacctataaatgtatatatgcacacatatacacacatatataactgtctcagtccatataatgttacttgtatgtgtatgttttcagggctgactgtttggtattggataagcaattagtgtgctcttccccaaggaagattatttctctggctctcagcatttctgtagttctttgtctggggttgaggactctaggctttcccccttccaggttatactacaagtcttaattttgcatttgtaaaacagggatgtaatcatttagatcttggatgcatgttaaagtcttagtccctggcatgacacaattgagaagtgataaattctttaggatgtgaagtcttatggaaggtcttgattactggggacatgcccttgaagggaactgtgggacactgctttcttcttctctgtcttttgcatctggccatgaagtggtcacaaattacttctcttctgctattaatctctcaccataatactctttgcatctaaagcaaggaaaccaaccagccaggggctcaaatctccaaaaccttgagccaaaataaatgtttcttcattttagctgatctgtcacaggtatttgttacaataaagggaaactagctaacacaaagagtaagaacagaactcaccagtggatttcctatcagcccaagaccaaatgctgcaaaggctagatataagatctcttggctttgactgcccaaattccagctccattcctcattgactccatagcctcatgccagtcattcaatccttttgagtctcagtttcctcaccagaaagtggtgatgataataataagagtacctcctttagagatcatgattaagatgtaatgctaacaggtaaagtgcatggaagaatgtccggcacacagtaagaaccctgtgctagttcagactttggtgacattcatcatgcattaggtgctgacccaagcacttaacacatatggcttcaacaggcgaggcaccgctgttattcttgtgcagaagaacacagtggtaaagatattaatcccagtcagagaccaagtgcctagccgggacctgcagagcccagggtcatgactaccacagatcactaatcaacagaggatctgagtgaggcacagggtgttcacctagagtcactagtgtttaccctcatggtgaccagaatgccttctcctgcctacctcgcttatgtggaagactttggcaacagctgagatagggcaggttgacttatagtcatcagaaagttaacacgttcactatacatcatagcaacaaaacagtatctcactcacaaagtgactctaggaaagtctgccttctttaccaaagtttaaaaagtcctccttcctctaaaattcctggattttctaccaattcttcctcagatctggccacattttaaggcaagtaaccataaatagtcacacaaataaataatgtgactctaccaaagatgaaaagggacttcccacatcccagctggccagtcaccttcaaccatgctgaaacatagcctaacataaggcacctcagaacagcaaggacaggcgtcatgttttgcaatctccttcctgggacttttggggaaagtgagaagactcaaaatgtttaagggagtgtgaatcttaatttctgttttaaaatgaatgaaaattagagttcactcaaaatctctaaagagccaggggtgttcatcctacggctgcttatgcttcattcagctgtgagccatggttgcccatgccatccatgctcagcaactcagctcaagtaattgtttgaatatccactctacaattcttctactgtgtctcccttgatggaactccagcaaaggaagcaagtttcccttcctcatctttttttcttggggcacaacagatgttcaataagcagaccctctgcatagaaatttagattactaactccatccaggcctttgtatggaaaaaataaatggcctttaaaattctttacattcatttttttggggtggggtgtcgaggcagggtttctctgtggctttggagactgtcctggtactagctcttgtagaccaggctggtctcaaactcaccgagatccacctgcctctgcctccctagtgctgggattaaaggcgtgcaccaccaacgcccggctacattcattattttgtgtgcatatgtacatgtgtatatatgtggcaaagacaggacaacttgagtgagtcaattctgggaatggacctcaagttgtcaggatggcagccaagtgcctttacctgctgagccgtcttactggcccataaagtgctttcagtagaggcattttagctgttataagacttgaccctctgcaaatagagaccaggaggcttcctgaggtcatataactagcctatggtcactaaggtggaattcagcaatgcaattccagggcgtgtaatcttagcttcttttggactatctcatcccattccactgcatcctttgaactgtgtcatagttccaacaaggctttccaaagcctttggctaaaccaatttagaaaccctgtacatctgcctaccatgtgtgaagccctatgctaggtcctcagcaccacaaaacaaaacaaacaaacaaacaaacaaaaaacaactgtcttcatctaagtagcaattctatatgtgctttgtgttttaatggactgagaaagtttgctccttttaaaatacacatatgtgcatgtctgtattaagctgatgagactgtgtgtatgtgtgtgcatgtggaggccataagtaattgttgtatatcttccttaattactctttagtttttgagggagggtctctcagtgaacctggaggtcactaatcggctagactggctagccagcaagccccagggatactctgcctctctacactagagttacaagtacatatcaccatgccttgctttttctgtggatgctagggatctgaactcaggtccttatgcttgtgaagcaagcatattaccatctgagccatctcctcagaccctaaattattttaattaaaaatttttactaacttcttgtaatgctagagcgtttcatcacggccctatagcccacccccacccccaccctcaccccacccccaagtttgcttctttccaagagcatttcaaagctgggtctgctgccacacacctgtgatcctggcacttgggggggcaggggccggaggagtgctaattttagttcagcttagactatacagtgagactctatctcaagtaataagaaagaaaaagaggttcagaatcaacacccttcccttctcatattttaataatgtaatttacccttcctctggcagagagggctgcaaagtcctacattccttgggtgtgaacgccacatgcaagtcgtcatcggtgaggtcccccagctcctgggccagctccgcatccaagctgtctaagtgtgtcatcacaagtccttcaaagtccactggctccacgggctcataaagctgaggctggagggagagggtgagaagagggccgtttccaccgggcttcctggtggcgtacacagacagacagcaggcgcgcagcagcggtggatatctgccctgccctccccttcaactcagcgtttcacttttacctaaatgctggagaagctgtcaaactgcagtggtgacaggagtggggaagaaaggcagtagcagagagtcaagtcacaacatgatgagtaagtaaaatcacaccctaaggcagaatttttctctgcttaattgcagcttgatgaggaatcctgaggagatccaaaatgagatcacaggctttgaggaatttccatcttttctcctgcaaaagctctctagggccattttctgtttacccaaacacagtgaaaaagagaaagaaggcaattttccagaaacccaggcaaacacagcactcctctggctgcgtactcagacacagtgtttcccttggcctgagaagggaaccctctatatactgctgctcaaagccagcactttagacgcaatcccagttgacatggagccaggcttgcggctctagggttgagacttccaaacactactggttaggaagaaactcaggggactgaagctggtgagcaaaccctgggtgtctgctgagaagagctgtcctgtcttcatttcatcctcccacggaggggggagagagaagacaagagaggttagaaactcagggcaactgaaacaatgctgctctttagttggtagtatcaagaattggcaacattttgtcagtttcctactagcaaaatacgttttctagcctatggcatgcaaagatccaggaaccactgcctgaaggcattgagagacacttagatcaaggagattggcacaagaataacaataacaacacagcagaggctgcaactctctgaagtgtccctttatggaagacagtgtagtctctagtccaagtgaacactgttctcctctacccccaaacaccacagaacaaaagccccagattcctgacttatgctatgggagggcaggcctgaaggaagggctgacaaaactggtttttcatccccttgagtctaaataccagcaggcttccagctggggtggaggaatagtgcagttgaagaggcaaagggcaaaaagatcccagaatgtaagcatggctttcaccattcctttcccacctcttctgccctggtagtaatggagacaggaataacttacactggagaaagaagacaaagctgcctgggatggctattcttagttgtcaacttgactgcatctgtaaccagctaaaactcaaaacagttgggcatacctgtgaggggtttttcttggtggaatcctttgagacaggaagacacaccttaaatccagatcctctgatgtcatatgacccaccctagatctgggccacaccttccagtggcagtccacatacgagggcatggaagaaggaagattttcctttgtacctgcttgcttccagcaagttcgcctattctaatgatgaagcattcctttcctggtattggaacctacttctttgggattccaataaataccaaagaccagatgagaatccagccttgtgggctgaacaactgctggatacttggcctttctgtcaaaagacatccattgttgtactagccagaacacagcctataaaggatttaataacctccttttagtatatggatactcagtccatcaattctgctcctctaaggaaccctgactaaatatgctaccctacttcccgcccagattctttaagatggttgagttatacagtgctcactgtcatcaggatgaaatggagacagaggtgagggttataggatagagctcagtagctgagtgcaaacagctccccacaatcatcaggtagcaagaagacaggaaggtctccccctgattctgacctgaaggcagctgaggaagggaccacaatactcatgaagggccgttcccaatcatgctcactagaacccagtgcaataacatgctaattatcctcattttcagatgatttaataatttgccttgatgacacggctagaaagtagcatgtttggaatccaaacatagtcaggctgtgctcttaacaactataatttcaattgttttctcttataggccttccagagaatcagtattttgtaagataactaaaacacaaggcaaatagttaagtgtgcatcacaataggtaaaaatgcatttacaactattcacaaattctgctcagaacttctcatgggattgaatgctcagatattatagtaaataaatgaatggcaggcataagtgtattatgagcaactcaaacataagtaacgaaatgcacttaaaaagcattgtgaatcatagttatgcctagtgaacaagcattaagcactggaaagtagaagcctcatagaaaaatgtatctatgtgcaactgtcagagaaaaaaaaatgagtccagtctagctaaaataaaacactcgccatgttcctgaaactcaaagctataaaaggtgaaaactcagtacctgttaaatgacagatggtccaaagatcaggaacagacaatgatatgccccatgatctggcaattactcagagttccaggcagaccaccccaaccaaaataccatctcatctgtatcactattccccttccttgtttcattcttcataacccctcctgccttcatcacagctgacatccacttatttgtttacacccacctcctatcctaaaatgctccacaagaacaaaggatgggttctttgttgcattgatgctgttatccatagctcttagagcagttcctggtacagagtaagaaccaacaaacatttccttaatggatgaaaaaatattgtcaccattctacatttagcaaacaaagctaaaggcagaatgtttcctctgccttcagtgatttcaaagtactttgtgacctaaaagaagcttgctttcctgccaacggaaatcttcctctgatgccactgtagatgctgagacggcatcatgaccattaatctggttttctttaaataaatcgtatatgtgtgtgcacatgcacaagttggtatacacacatgtgaaggccagaggtcaactgagactttcctcagaaaccatctatcttggttttggaggcaggggctctcactgggacatagggctggtttgccagtgagccccaagaatgctcctgtctctaccttcccagcagtagaactgtaagtaggtgctaccacacctggctttttaagtgggttctggggaattgaactcagatcctcaatgcttcagtgttaagcactgtacacagagggccatctccctggcctgttttgatccctgtttgcagtgaccataacaaagtgcctgctgtgtgtgcagaatgcttgtactttgttctccactgtgaatgcgcatggaaactacacggagtacttcattttccatcatgtccctccagtacaatcaacaacacagagcggctaactctggaaaaaactgagtaaaagagaacaacagaactcagaggcacaaaggaggctcagagttaagaagtcggcactcaagtcatccttagcttgcaaagaaaaagggtgctgtgtttcacagaagccaatgtgcatataggaaggaatgtttctcaggcatgaggcctccttaaaacatgaatgttagacatacaaacacatcctgtggccgtggtgctcgggtgcatgcccagggtgtggttttttacgtcctttactttgtgcagagccgtcaggtcctggctgctcctttcctttcacttcagacttttcttgtattattttttaaaatagtgtgtcttcctccagaaaatgtacttaaggttataaaccaccacacaggtcttcagtaccccttagagcacagattcccaaacctttcttctatgtacttgctataccttctacttttaataaccagagaaagggttttaccttttatagtttgcttacagaaatggctgacaccagatctctggttaatttgctcccaggacaatagcagcagagaatgccacagctggtgggcatcttaggccaggacatgggatgaccagaggcccatctctgtcctcaaaggcccctgacaggagtgttaggcagacccagtccaccaccatgtctgaaaaatctcattctaaatgatagctctccttcatattaaaacatgcaagaggtaaaagtagtttattgggctgttgagatagctcagtgggtaaaggtgctgccctcaagcctgataacctaagttcaaccgccagatccatgtggcagaaggagaggacaagctcttgcaaactgaactctgacttctactggcatgcgtagcacatctgttcatgcatacacacaaaattgatgtaattttctaaaaagtatcttatctattttgaaaatatttgtacacacagtcatcatagcaggtatttatagctagcattaaaaaaaaactgaataaaacaaaaggagacaatataatgtactgcctcccactcatttttagatctatgacgagagctgtattttgtaaggattacctccagggatagcatgtggtccctgcttactacacatctaccactcagagcatgcagggcaacagaagaaacctcctccctgtatgacttgtcttcccaaataaataacaaagcctcatagagagaggtcatttcctacttaccttttaatgttcgacagcgtctctatagtgccaagtacccaaagcaaacaacactgcccgctattcacacaggctctactatagaaccctacattgatactatggaggtaacataagctgcctatttttgcagaaaaaggaactgaaatcttcagacaggttaagtgacttgtcccaagttacacagccagtgacaaccaccttcctccttaggttcatctgaccccaaactctactcttgccaacagcaacgactgaactttatttaaatatatctcttaatcaatcatttgtatcaacatatgaggttatgaaaattatcatattactaaaagcaaaagaaatggtcaagctaggcggtggtggcgcatgtctttagtcccagcacttgggaagcagaggcaggcagatctctgtgagttcaagaccagcctggtctacaagagctagttccaggacagcctccaaagccacagagaaaccctgcttcaaaaaacaaaaacaacaaaaaaaaagaaaaagaaaaaagaaagaatggtgaagatgcgtttggtcttggtttttagttagccaaaatgatgcccaagcagtcttttcagcctctgatttaatattgtttctaaggctctggaggcttgagtgataagccattcattcctctgccttgctaaaagtgactcttactgaaatgttccactatttttctaggaaatgaaatattcttgaggtaaaggaaaatcaccttgtagtctggtgatttctcctgggagccttgtctgagaagatgactacaggggaggcacagtcacacattgcctgaaagcagatgatgccagggagctgtggttttgaaaacatagcacagggttttagaaggtagatcaggcaacttgactcccacagtagaagaaacagggtaagtctgtgctgaaactggagcggggagctccgggaaccactgaggaaactacattgtaacaagagggaataagaacatgtgaagaacaaataggaccaggattggatgatagacagcaactggagaagtgattattgtaacatgttaacctttccatgggcagctaacatgttaatttggcttcccagctactgaataactcatcaaaatttacttttgtcaaaaccttctaaggagagagcaaactactgaaagtatacttgcaaacattacattgttttccttggtaactttccatttaacatggatttcttctgcaataatgcaaggctacagtgttatcacaaaggctaaggggacaaggggttaaacctacaaacttccttaaaatcctctttactgtgtccacactatttctccagcagctgctagagagaactctagtcttaatattttttaaaggcaatcaccaaagttccccacattgtttaaaatttaaaagcatatcaaatcacttttcaataaaagttttgcaaactttgaaatacaacatgagtcagaaatcacccatttatcatccagttaggcttatatgtaacatatcccagtttacttcaagaacacagacaccatacacttgtgctttataccctagcctgaagttttgagccgacaggaaaatacgaataaaaagggtggcctagcaaggctccaaagtcacaaacagggttttcaaaaagatgtcatcacaaggtaacctctcatagtgaaggtgctatatatttgctagcactgcttcactaatgacacagcacataaactatccttctgaaataaccacggatcactccagtaaacatacctgaagacacacagttaacgcggctggtaaactgttacaggcgacaaaatggcgcatacaggaaaccggggaaggttacaaaatttctaagagcagaagtggttttgaagtaataactagaaacaaaaaaataacctaaccttctcaagataaccactagatcagccagagagtgtggctgtgggctgtgctgtgtgaggaagtgaaggtaaagcaggctcagctagcttaaaggaagtggcaccactccgggttacaaaccgtctcggttgagacagttttgcttcacccagcacacatctggccttcagtctataaataatatgacacacatatgcactccccagttggcaccttgcaaggggaaaatggtatgttttaaaactaaagattcgttctcctgtgtgatagatttcactggtgtgaagttccaggcagagccaactataaccacagcaaggaccagtgactgtctgggatgggctcaaggggatgcaaaagggtgatggggggaatgctctagaccttgagcgagtagaggttaaatgactaataaaatgcccagattcacctaaccatgatcctaacattgataaatttcatagtatgcaaatttcacttccaagaaaattatttcttaagaaagatgtgtaacttgggcttttgaggtctgtcaattaagtatttccaacaaaagcatgctatatgagctatgattgggatgggtttgagtagcctaaaagtcccctaagtagagaacatcagagccacagtcttgggctgtgtcattctacgcacatcctgtttggcaaagggagatgtctgatgtctgatgtctagaggcaggcagagtcaaagagcgatgggcagagaatgctgggtaaaaaatgagctaaggctagttgggggcgggagtttggatgctgggcgcttctgcccctgaccactggtcaaaatctgtcacacatacttactagctgaagggtggggaagccggatgcactaatgctgtgccggtggtactgtccgaggttgggtgggagtgtaaactgctttcttatttccgatgatgaataccttgaattaaaatagaaaaatctaaattattattttttttaaaaaaaaaaaaagacctgcaaaaatgacaatgcaatctttgcattgtgaccaaagtacacatagcagtttgttagtggatgctgtgttttttgggtgctaaatgtaccctacagcaattcacaggggccagaatacctgcaatcagggccaccagcctctgtttgaagactgaaggcagaaaggccctgaggtgcagtataaataacctaagcttctggctcctggccttccagaggatctgcctctgtgtgagcatgtctagcttctggctattctcatctgccattttaaccctgccactttccatgcaagcagctgcggcctttgccttggctgatactaaagcagtgtgcattagagactattggatgaaaacagccacttccttgcaagcaccttcagtgagacccagaatccccagcattgtttctccaacagcttccactacagcgcccccctgcacatctacattggcatggcttcattagctcacagccctggtgacttggaactgtttacatgagagaaagctgctcttcatcatctgttcatacctgtgggcccaaaccctgaacaatgacatggaggacactcatttgctaggttactggagctcacagacattttctcatcatgtcatttgatggtagctgacttctcagacaagttcccaaaaaatgtactcatagcaaatcaggtcaaaacatatgaaatcagaatcattaatggatacaactagaaactaataaattactaaggatcaaataggttgtatatttaaaacacaatgcttctgtgtactatagagatataaaaaataaaataaaataaaacttatatttccatcatgacaatgtacagggcatcatcattgtgccccagccttccatgtgaagcacagagatgggcaggagattgctaaatgtggtcatcacttctcccccgacaaaagcaccctgttatctttcaatattccctactcatctgtgcactgcttaggaagcaatatggaccaagtggtatacacataaaccaaggtgggcccatcaggtcaccttcctaggactcagcatgaggaagaaataagtgcatggcatgcattcatgctcctgctggcccttgtaccagggcctggtgaaatatggaatgccacagaaagggacagcaggagtatgaactgtgcccctaatttcctagagcattgtttttacttaacatttgaatagtaaaggaaaacactgtgtaggggtgaatagtctattatagtctatgagtcatcagagaaatgtaaagcaaaccataatgatatgtctcttcacaaccatgaggatgaccagaacagagcactggactgtcagtcacaagtgatgctagatgatagagaatctctctctctctctctctctctctctctctctctctctctctctctctctctgtgtgtgtgtgtgtgtctctctgtgtctgtctctctctctgtctctctctgtctctctctctctctctctcacacacacacacacacacacacacacacacacatgcacacgcacatgcacacgcacacacacacaccattggtaaggacatgaatggtacagttctctctgaaacaatctggcagtttctcaggaagtttagcgtgtattttctatatataccaaaatcccaacagtagctataccaccatgagaaatgaaaacagaaaatttaaatgccaacattcacaacagtattatacacaggatatacaacaactagttggcagtggtggtccatgcctttaatcccaatactcaggaggcagaggcaggtagacctctaaatttgaggccagcagcgtctatagggtgagttctaggacagccaagactacaaagagaaaccctgtctcaaaacaaataaacaccccaccattgttcttaagagttcaaaggtggaaacaacacaaatatccagtggctgaaggatgcacaaaaagtggtctatcataaatggaatattactcagcaaagaaaggaactaagtactgatatatacagtaatacatgggagaatcccaacagcatcatcctaaggggatgtaaaattcccagaatagtaaaatgtacagatcagaaagtagatgagtggttgataagggtgaatggggttaaagagtaatggaaagtggctctgagcagagtttctttttgaactgatggaaatgttctaaattctgttggtagattagtaattatgactatattacgagttactagactgtgcactttaaatacatgtgaggtatagatgctgtatctaaactgtggtagatctagataaaagttccaagtgtcagtacataataagggtgaatgaagaaattgccttgtctagggtggcaactaaaaatgggggaagtttgggttttgtccccacatgtttagtgaaactgattttaatcagaaatttgaacgtcaccaatttaaaaaactagatagtcccaaaccaaggctacctcaaataaataataatatagcatgtgcccagcagtgaaggaactcaaagcaacacagaagccatccatctacacatttagacactgactatagtcacagcagagcccagacaacaagcaaaggccctcatctgacctttttgaaccttctcactgaccttttacagacaatacaaagttttccagaaacttctgccttcagttcctccccaaaacttctgaaatagcatgccattgtttcagagttgtcccggcacctttctcatcaaagacatggtggtctttctgaactgggaatactagacaacatgcctctaaccacagctactcatgaagccacggcaatagaattttaaattcaagaccagtcctgactaaaaattaagaaataagaggcgttagggatacagttttatgcagagtgcttacctagcatactcaagacactggagtcaatgccctcccaaattattgtgttaaatatccttaagagaccaaataccactgtttaacaacatatcagcatcctgtagagcatcagcatcaaatgtaagttgagtcatcataagtctctctgtatgcgtgtactcgttactttctgatgctgtgataaaacatggaccagaatgaacttgtagaaagaagtcttatactttcatgtcacagtccatcaatgagggaagtcagggcaggaactcaaggcagcagtttgaggcagagatcatggaagaaaacagaaaagggcttgctctccatggcctgcttacttggctttctcatataatcagagaccacctgcctgggtgtggcatcacccaccatagtctgggccttcctggtcaatcattaatcaaagaaaatgcccccacacacttgcccacaggccaatcttacataggaaattcatcatttgcggttccctcttctcatgtgaccctcatttccatcaagttgatgaataaccgccaacacaaaatggaaatatttcaatgggccagcaatctccttaataatcacagtaagagaacttggttctctacctcattcagatttttatctgatataaagttcatgtctaaaaaaattctcatacgggcaaggcatgttccattggattttaagaacttgcatacttatcagcgattacatttactgatttgaaacttcagtctcaaatgactgttcagtgtcctgctggccaaatcagccctcacttctgcttgggcctagcttaaaggactctgctcacacaggtaaactggggtgagagatcggctctgcagtcatggtgggtataggggcatttgcctctgccctgattctcagatcaagtctgacctgtccaagataggtttcaggattccagactttatcatggtggcaatcctgtagtgagttaagtcaacctcctcctaaggaacttatgcggcttaatgctagaatcttctcttttcttcaagttagctggacgtgagccttggaatttgtttaacatgtcacccacatgatgaagagagactggtggtagtggatagggagagaaactctgtgttttcattcagattaatgatgaccatgacagacatttgagaccaagacctcataagctaactgcagaacacagcttaccaaagcacagtggctagactatttgtaccaacctaataatgtgttgatgcctttgattgccctgttctgaaccaactcttacggtacagcctgaaaaatggcaatcctgagtggtttttacaaccacaaaggccaagtatttcctgaaactgcataagaaaatgactggctcaccatttgctcatcaaacactgctaagcaccaggtcctcagccaaagcgatggagattggagttgatacattcatcctcctagggatcctaattcaatgggtagtgagaggtggacagatggaccatgggttaattacagcataataaatataatggggaaatgtgcgtggttgcttgtgaatagacaatagggagtcataattcagcccaggaatgcctcggaaacatctgaagtgaaggagcttttgagacagtttttggaataaaaccattagaaggaggaacccagatggagaggaaaagagtgtagtcagaccattagacatcaggtttcctccttcctatttcaagcatttttttttttttcgagacagggtttctctgtgtagcttcgaacttacagagtactgcctgcctctgcctcccgagagctgggattaaaggcgtgcaccgccaacgcccggctatttcaagcatttttaaccaccctgctgagccttcttcatgcaatgtgtgcatctggaagaatagagtggagtgggaacccaaggacacaggcctgaggaatgctgtctgccttatgtctgggttcaagcacattggctaatgaggctgggccgtacttctattacatgtcaactggaggggctaggctatgtgatctctgggctcctttccggtgctaactggcaaacatggtgagaatctccgagtagaacaatcaggatcatagcaaacaccagcagctgcactacgaaaccggttacacagcctcaaaggcttctttctgactttcatgtctaaaggacactgtttcactaaaggctgcgatgcccagcagccagagaggcaggaaagatttttaaaacaaggaacagccttatccagagtacttatggaggcttgggggaaatttcaaaaaagaaccactttccccatctttgtctgacctagtccctaaacaactccatcttttctcaaaaacttattttagcttaaatgatgggaaccaagaagctgcactcttcctaaggtatcaagcacttggcccaaggctccaagtcttcctctctcagggaacacttaaactaacttagcgatatattcaccctttttccaaaagcaagggctcattttccatcaacagcttccaagagcaactatgtcattatcattggtgcaaatattctatcattctgggcaaagagccttattattctgccccctacatcatgcaaaagccctaactctgtcctcaatagggtaggctctttactcactgctactaaagtgttggttgtgttagtataatacactaaccccttcaatagcccaataaatggaaatacagtctgtgcatgaaatagctatttaagatgccagttatgtttgttttggtgaagttgtaaggtctgagttatggaccaagaagttattttaagcccagaatcctggcttaaaaaaacacacaactttgtgaaagcttttggaaagtggcattttatgcaggctttttctccatgtgtaatatcggaataatgccacacttattttttttaaaaaaaaaacagcaaaatttagactagtaggcataaattacttttagtacttagaagtgataagtgcttagaaaaccaaagtagtaaaattaaatggacccttttaggagacattggcaagtatgaggattatacataaagaaattgcttttcttctatttttattaatccactgcttattatccatcttaaattcaaaacattcaacaaaatctcatagtcataaggatgacctgaagctgttctgtgagactcctggataattatgcaagatgcttatagttgggaacatataggacactttccttttacaattgagacaacagaacttagatacaaactccccagaactcaaaccaagactgtatcaacaagctaattagcaaactttagatatccactttgcagtctatcctagaatccttctctcctcagcagtggtccttaaactgtagctagggagctgttcagcaaggaagatgtctgggctcctctccagggattgtgattcatggtctgagcacagctagaacaggcattttaacatctgcaggggttcaggtgccctgcagctaagtgcatttagagaagaggtaaagactgtggattcagtgccctcagaaagccttgcttagaaacctacctcaccattaagccaacctcaaatctcagggaataaggcatacttgtttctcactcagacataagcagaactcaaactcatttggttttgtgtgtaattcctcatcatcccaaagcagggaaaggttagatccataattaagtaaggtcaagtccctgagatgcccttagaagtaaatgttttattccttaaactatgcaaataaattcttcaaggtactttagaataggaaggattttaatggggtgagggataggagggcagggcatggggatggggaggaacacctaaaacaaaaagccttttgaaaataccacatgaaaacttagtatggtaatttaaatagagatactccataatggtagaacaaataacacattacatgctaccaagtaaaaaccccagtaccatgagtgggtaatatcttttttagctgttagtcaatggcatccgatagaccctcctctcccaaatattacaagttatttccagtcctctttattgccatccagaacttgacaataagactctgttgttgaagatactgcatacttgagtcatagaacataaagaaatctacctggtactcatttggaagcttcatccctgttggcttaccattcataatgttagaagatgccatgcatacaaagcagaaaatgaatcatgagtctcacccagctatgaatcttgggagctacaataatgacctgcctagcaagcacaatactactagtgcaatagtgacacgaatgttagggtagtagccaataacttttcaaaattggatttaaggcctgttctataaaataaaactcactccagacacagtcaatgaggccaagaacttggctagatagggcatgggcctagagtacaacatactatttctattctgctaagtggacaactcctaatgtcttacaactatactcattgactcagcctcatcagagaagctttttgcaatagacagtaacagaaaactacagctagtgaatgagcagaaaatgagacttcaaaattctcagccatagcaagttatacttatatatttatgaataaatacgcttatacatatacacatatttatgtaagaataattgatgaaaaaggcatgaatttgaaagagagcaaggaggggtacatgggagggtgtggaggggaaaggagaagggagaaatgatataattatattataatctcaaaataaaataaaatttcagtttaaaaaaacagggaataattgtcaccatgaaaatatatggcaaacacaatggaactgaagccagtgaacacagaacgctgtcctccatgttctcctaacttcctcacacaatgtagtcaactgtttactttcttaactttgtttcttgctgacattattgtggcatttgtaagtttttcttaaataatgcaaaatgagcacagaaaaaaatgctcaaccctagatggggtgtctgtattagagtgctcccctcaagactcagggatctatatggacgaggggacagaaacattttaagagccagcagtggtgaatgacttcaaggaattagtgttttccagaaatagggcagatgcacatatgaacttacagagactgtgacagcgcgcacaagaccttaaccagagcaagccagccaaaatcccagtgtggaggaagggagggggcacgaagcccactcctagctgaggaactgctgacatctggttactgctggaagagggaagtcagttcccttcagtgagtgacatccgatacattgtctatactccaagaagcctccaacacaacctggactagatcagtggagaggtgagaacagaaacagacagacgagagagagagagagagagagagagagagagagagagagagagagagagaggacacgaaagagatataaagtcgatggtatggagttgggggaaggagatgaatataatcaaacacaatgtatgagattttcaaagaataaaaacattttaaaagtaaggaaagaaaaaaagggggaaatcaaagaaaggtcatattgttcacacagtgaatgaactggactgtacatgttgactaattatagggttcccttcggaaagcacggctcagctaaacctgacacactgaccagcaattgtttaggaagaactgggttcattttgtgtcctcaaatgccctgcaaaacccacgagggcccagaaggatggtctcaatccataacaaattatggactggaattgcacctctgtgagatcttgctatctgtattctttgttagtcaacagtatatccaccaagagcctgcaactctgcctggttcttattatttcattatggctattcttctctattttatggttcttattaaactgatctcctatgcagttacccaaaattaaacaaaagaaaactacactccaaaagatagaattgcttttcaacctttaatgaagggaacatacttagctttaacttcctatacctctagcatacttttcatctgaaaacatttcaagaccttggtgacattcttattcctggggagtaagcatgtggttgtgagccctgaggcggtccaggtgcctttgcaccaggtgactgtgcatgaagcatgctaaggtgacattaacccacgttaattaaccaaaatgaaatcttagaaaaggaacatctaaaaccagggggagggcaccaaggcaatacctgtagagcagcacttcctgtgatgtctctttagtcaagggcaaggcattcccccacaagacagcatggagctggccctgcttccagttttgtcagtctcttacagtaacataactttgagggtcttaagaaagctctccttcctgcttcagagctgagaggaaacttagttctaatgctcagagagggcggttctttcctaaagaaggctgctataatgatccaaacacacaggatctatgcgccgtgacatacgagaaaaagaaatctcaaccaaccgtaacctgccgcactgaaattcctaccaccgtgatgcatatatgagtgttcagtgaccaattacacgagaggataatacagatactaagctcagtgacactggcaggtcactacctctgatttgcatcatatgggaacactgaggaaatcaagctgaggccatcccctggcattgaagaagctgaggaagacaacaggccctaaagaaaaatggtgggaaatggagtgcagttcactaccaaaaggaatgcagaataaaaagggtgaattcaactttcaaaactagtctaagggggaaaaatatattctgagttaagcccctgtctcaaggacagaataaagttcttggcactgtgaaacaccctagaaccaactttgctcatatctttgttttcttctagattaggaagtaatagtactttatgtgcacacaggctaccaccctgtaagtcacaaagcttgtataattttatgtaaggaagtctgcgtggtgtttcagtaaaattagtgaatccaacaagaaatgatcaccaacatcatcacaataactgacaaaccacttatctttgagaggaatgacacctgtggttcaaatcctgctttgtcaactaccagctaggtcatctagagcaaaagagttggtgcagctaagcacatgacaaagggaagaggcctagagacatggaaaggcctcagcaggcataggctgtaaggccaggggaactgtcagtgagagaagggtcctgaggtaaatggccacagtggggccagcaaggagaagagaggaacagtaaccacaagttcccaaactgtcaagctgtaagaatgaccccacgactgcagatcatgggctggctaagtgccctccttactttcaagtgtaccttaatctgagtaatgaaattatttgttattcttataaactggaagagcctagcacggtccccactattacaataaaaataatagtcacaaataaggaactacagataactaaggaaagctgggagtgggatagtcttcttcccaaggggtgtgtgtgtgtgtgtgtgtgtgtgtgtgtgtgtgatacggacttagaaaattgtattcatatacctaggaaatatataaataatacatatttatatataatatatgtaacatcaattaaagaaaaaggccatgaatttgagaaagagcaaagtgggtacaaagaggggtttgagaggggaatgacataaattgttttgtttgtttgtttgttttttgagacagggtttctctgtgtagctttgtagaccaggctggcctcatgcttacaaagatcctcccgagtgctggaactaaaggcatgctccaccaccaccatgcagccaaaataattatattttaatttgaaaaacaaaaaaatgctatttctaaaagaatatcagtaataatttagagtacttacagcctaactggatgttttaatgagctcattaacctttgcatctaccagacagggttgaaattaagctctgcaaattaggaaactgaggccaagaaaggttatgaaacttgcacaaggctttacaggtagttggagaaaggtagcagaagacagccctactggaaaaatccatcacagcaacactgcagagaagcctgtcacagaagctgcgtttctggtattttcctcccccagaagattagtggcagagagctaggcatgtgaaggctttcccaaagaaagatattcaactttaccccgaccctcgaaaagaactggtttggcctgcttctaagactttgaacccagtttcagtatcattaatccttcatgggtaagtaactgtgcaatatactccacgggtaatgcaaacacccatgccagcaatgggaaccggcttaaaagagaattccagaagattcctttttcagaagccctgatgttctctgtgtgcacaaccttgtctcctattgtttcagctatggataaatgtccaacgctgggaaattcagtgaaccctcagggttccaaaatctactaatgcagtaaatgcttctcctggaatgtggccaaaggcaggcagaggaggtacctaggacagacatttcgttcaagcccttactcaagattgctccagaccccatgtttcatatcttatgttgacacactctccatccccaggctcccctctgcatcctatggcccctgccccttccttcacacttctcaggcagtctgcctcaaagtccagcattacccacttcccctggcaagcaggctttgaccctctctctctctctctctctctctctctctctctctctctctctctctctctctctctctccacacctgtctctctctgtgtgtctatgattcaatgttctgcaataactgctctaggtaaaactgctggtgacctttcgctggacagccctggttttgttctgacttgatttttctgttgcctcagatgctgctgacctccaagcctcatgaaacttccctgagaatactccaactattaactctgcctcttgagtggccctgtttttttgtttgtttgttttgttttgtttgtttgtttgtttcttttttaaaattagtcacaagcttgcttcacatgtcaatcccagatccctcttcctcccctcctcccctgccctaaccaacgccccccccaagccctcaccccatcccccctctgctccccagggagggtaaggccctccatgggggatgtccaaagtctgtcatatcattccaggcagtgcctaggccctcctccatgtgtccagactgagagagcatccttccatgtggaatggactcccaaagtccatttgtgtgccagagataaagactggtctactacctgaggccccatagattgttgaggcctcctcactgacacccacgttcaagaggtctggatcagtcccatgctggcctctcagtaatcggtctgggatcccagagctcccccttgttcaggtcagctgtttctgtaggtttctccagcctggtcctgacctctttgctctctacaattgggttccaggagctcagttcagtatgtagctgtgggtgtctgcctctgcttccatcaaccactggaggaaggctctaggatggcatataaggtagtcatcaatctcattattgaggaagggtatttaaggtagcctctctactattgcttagattgccagttggtgtcatccttgtagatctctggaaatatccctagtggagtggccctgtttcttaaataactttcctcccctttaagtcctttaaatgtttttcttcaaaatagcagcacttggataaatttgggaattaggggatggggttccaggtaagtaactcttgttcctgaagcatgggaaagcattaaagagaaaagggcagggctggggcaataacattggttaaagtgcttgccatgcaagcatgaggaccttagttcagatcccagcaccctcctaaaaagccagtcatactagcctgtgcctatattcccagagctggggagacagagacaggaagatccctggggcttgctgctcaaccagcctagcagcatcatgaagccctagggcaaggagagaccctacctcaaacaaacaaacaaacaaacaagatggacaattcctagagtgtaacacccaaagttgtcttctggtttacacacacacacacacacacacacacacacacacacacacacacacactcacaggcaatttcagcaaagaaacatccagtattacgtggtactgcaggggcagctttgaggaatcttctggaagcatgttatttaaataaatgattataaatggttttttctcagaggaagtcagtttctttattgtctcattccttcaaggaacaatgtcaaagatatttagtccccttttggccatttagcccggatggaaacattttctctacaaaacacagaaaggaatttctcaaaatcaattagtttctcctcttttgccctagtcaaagcagtagctcttgagcctgggtcatttcctgttggtttaatattaaacaacacaggccccctgtgccctcacatcgtgagccctgagtgctcctgcaggcatggtaaatgttcgtgctgggacataatgacaagagaaaggcctgagttgtggaagacaaacaggggttcctatgtttcaggacacgaaattgttcttacactacccatattctaagatgagggaatggcctttgagccagctgcaacttcatggagttttcagactgactgtctagatgacacaattaaaagcaacagaacatcctttgaagggctggctaaatgtcaactggcagatgggatgcactcaaaccaagtctaacagagaagaaaggcttaatatcatatattaaacttttgaaaggaaatttattgaagccttcagagtgatgctgacagtctataaaacaccactgacttttctctttccatttacctctgtggagtaatagtctgtggtgtgaggtgggatgagcttcgcgtggtgactcgtcctcactgcttcacagggtttactgtcagtcactggaactcggcatggcaaactgggggcggggcaaatgttctgctacaggcagcactccccccaaattcatgctacagggctacctctggacctggatgtttgccagtcctttaacattgatccaagatcccaggaaacttgccaggcagtgggggtgtttaatgcagtatcagttcaaagacagataggagaaacgggttttgtttcaatctgtgacagagtgacctcctgtgaccaatccacccaggcaaaaacaacccttggttcacagcatgcatccatttttgacccgaactttgctcagttacctagcagtactatcaggccaaaatgcccatccataaaatgaccatgttcccataagcttccgtcttgcagaatgagctctgcttcctcaggcagcaactctgccattgtaacatgatctcagtaaaaatgctactaagtctttgaccagtaactcaatgaattaaccaactacaagccaaaatgatgtcagcctacagtagagtaggggtcagcctcactggatctttaaaaaatctttcagcttcatcagcattcaagatgcagacttcattacaagacttgattctggattcttcaagagccaccttctaaaaaaggaaatatcctagaaggttacataatacaagttgctaactgaagagagctcccagtaccataaacacagcaaggagtaagcagcctcccaggcctcagacatgaccatggaaaccagtgaagcaacctcaggagggaagggtgagccagaacaaaaaaacttgcctgtatgagcaaagaggccagtgacccgaaaacccagatatcctgtgtgttctagagggagggaaggagggagggagaatatggtactaaaatgtattttcttccattaactgcagtcaaaacctttgaaagctgccattcaagaccaaattaaagtttggtgtaggaagtaccacagattatctctgaggatggcagttgtaaggagaaagggagattataaaccaaaggtctctaacattgtcttccaaggggcaaggtgagaaacacatgtgggtgtcagctatctagactcaaccaattcaatgtacaagcaccacacacacaccacacctcaactccagcccttgaatggaaatcaggggaagaacagaaaacaactcagaggttgatgcaaaagtggtatcacttagggtacctggggactgatgagatgaaacaaagcatgtgtcaatcagcaaataattgactgtcaaggcactgctatgttccttcttctttgcatttgaaactcaaatttttgtcagagagagaccagaactaaaatctgagtcccaggatgagccttttagcacaccatgtcttcccagataaagaaaacagcagaacttgtgctcagtaggtttgcagggtgggttgtaatgtcagcggcactcagagtcaggaatgtgccctggtcatgcagggtcagatgtgaatggggatgtatttgttactcagaaatgcagacatgggatttcccaccatctcaaacattttctctcccttctcaaaaactctagcttcttgcattattcccctgaactcattatacccctggaggctaagctgtatttagggtttttaagcagttgttctagtcttgatggtgctgtagggcaaaggttaggacctttagtttgaaaacacattttttgttcacagctaacatcagagaagaaccaagtcaacttgtgcctttctcataggaagacagaagaaagacttcagattctctggctccattcagaggagatggaaatcacctctccccacagctagtcctctgacccatctgagagtaaactaaatatattatatacacttggaaaacaacctcagcacatggatggggtattagttactccttgctaggacaaaatgcttgacaaaaagcattaaagaaggaagggtatattgtggctttcagccttaggggatacagtccatcatggcagggaaggcatggcagcaagagccagaagctgcaaggttacaccacacttgcagccaagaagcagagaatgaacagggagtggggccaggctgtaaaactttaaggacacccccagtgacccacttcctgctgtaagctccacctcctgaaggctccacaatcttcccaaatagcaccatcaactaggtttgggtttgaccacagtgctgtgtccaggtcttgagtcagatgcatgacctctgccccctgagagaatgagaatatacctaacttctttagctgttacaagaattatccaatgtaatgcacatgcaggacacaagaagctctcaataaacacaggggttttaaagacagtaatgaacacatgtctctatctgtctctgacaagaaatctacccttggtttttcagtatttcctggtttacatttggtttccctatcagtgagaacatgaaattgaactttctacagctgtcctttccacttctcagtaaaacagaaaatcttcaaaaagtcacagttaagagctgagtaaggaggtattcaccaggaattccagatcttagggaaaggattgagagtttgtaaattcacattaccagattctctctctctctctctctctctctctctctctctctctctctctctctctctctctctctcacacacacacacacacacacacacacacacaaagcaattaaaaaaacattgtattgaaattcaggcattcaacaacaaaaatcctggcatccagcctgggccatattccaagaccatatctcaaaaggaggcaaaggagaagagaaagacaaagaaacagaaaggagcaaggaacaaatgagagatacagttaactatcattttcagtaggcctggatactagtttcttctcagagacaatctggagtctggtaatcatctttccagatctaacaggataagaacttaaactagaacagacattgctccaagacaagctttggagagcagctaatgctgctgctcctggagacactgacctagaccagtgaggtgcacagcccttcaaagccctgcaggctctccatgtccatgggcaaaagacaatatgagtcaccagagctacttgctaagaagacacaggctgcccttatctgtggaggagcaggcattatttaacttacacacacacacacacacacacacacacacacacacacacacacgagagagacagacagacagacagagacagacagagagagaagaggtagagacagaaagataaacagagacacactgagaaaaccttacttgaatgtaaaataagtttgctaacttcttcctcttatgtgagaatttaatgacttaaacccaactttcttaactttaaacagtacatgttaaaaacttatatggtaaagccaggcagtgctggcacatgcctttaatcccaacactcggggggggtggttgggggtggcagaggcaactctcccggagggtctagtctacagagtgagttccaggacagccaaggctacacagagaaaccttgtcttgaaaaaaacaaacaaacaaacaaacaaagaaaaaccacatacacacacacacacacacacacacacacacacacacacacacacaatcttacatggtaaataacttccacatagtctcatataacccttatagcaaactcatagaaaattgtctttctggttaacagataagaaacatcgcctgacgttacctcatgtgtggatttattactggggacgtttcaccattggagtgggagatctgtgaaagcaggagctttcataccaagtctaatgtggtgtctgacacacattcagtgctcaggaactatcctcacatgatgaatgaaatgactaagaacatcgtaaagacatcgggcttaaacacaagtagtatgcagctttggttataaagaagaaatagtgtgttagtgatttcttctaggtgattttttgttagttctctgagaatttcatgtaacatgtgttgaccttgccccctttccacaactcctcccagatccactctcgttcactacccactcaactttatgtccttttattttattttttaacctattaagtcaaattgtacagcccacatattcctgggtgtgtggccttccactagagtgcagctgactcaccaggggctacacgattaaggaaaactggctcttcctctcccggcactgatcaattgttaaactagagctggaacttcatgcacatttcctatcaccatgctgctgggtttgtttgtttgtttgcttgcttgtttgtttgtttgttgttgttgttgtgtgtccaggttgggagcttgaacaggtcgtaagtgtgctgtcatagctgctgtgattcatatatgtggatgccctgctgtgtcctaaagacatcttttccttgtagtcatccattgccactggctcttaaactctttccactctctctgccacagtacctcctgagctttagaaggaggacatacggtacagatgacacattcgggccagactattcctaagtcttattctctgcacgttggccaactgtcatctactacaataagatgcttctttgatgagggttgagaaacattttaatctatgggtataatgataagttattaggaatcagttcaataacatgtccattaacagaacgatattagtaaattctcccctagggcctgtgtcttgtctagccacagattcttggtgccaggttcgggtttaatcttgtagcacaggacttaaatccagtaagaaaatggttggtaactcccatgatgtccatgccactattgcaccagtagtatgtcttgctaacctggccattatcgtagctcacggggttcagagcaggttaagaccgatgattgcttttcccctttgatactctgtataactttaatctcttccagcatatataaatcccttacaatggctactttatagattcttggggatagacagaatactaattcgtatgatgtcctcaaatggaagcaagattacccagaatagcaattgttctaaagggtgtagccatcaggaaacttgcagaatgaatagtatttgttcaaatcaaagacacttttaggttgactggctcaatcatcataatggtttccattcaaacttttgaggttaatttcttcttaaaggtacatacaaaataattattttagaatctgttagggatgctgaggcaggaagcttgtaagcttgaggtcatcctggaactcagagaaacctgtctaagtaattggctttcaccccaataagtgaggccatgcatgcttagagggactggaactttcaaaacatctttatacctcatcttaaaaacagatgccacttgagcccttccaaaagacagcagggcagcaacatagaccagtgcatacatctgaacccaagatgccatttgtgacatttatcccatggaatcattaaagataagagcaaaggggccatggagatagtgcctttggtaaagcgcttgcctttgcaagcacaaggactgtggtctgatccgccaaacccaagtgtggtagtatttacttgtagtcagtgttggggtggcaaagacaggcagacacccggggctactgaccagccagcccagcatatttggtgaaccacacattaaggagaaacctgtctcaaaaaaggaggaagaatcaccttaggaatgtcactcaactatgtcctctggcctctgtacttatgcacacacatatgcttgcacacctacacccacacatgtatacacacacacacacacacacacacacacacacacactgatagcacacatgtatttagtacagagcacttctaatagttattaattgaaaaccagtgcagttccacagagaattagagaaagtttgcacttccttccaggagaatgtttcacattcattagaaatgtaaaccaagagtattgtatgacaagaaaggttgctgtgtctttaaataacaaagcaggttataaaacactgttgagcatgcttgtaagtgtgtagacgtcgtgtgtgtgtgtgtgtgtgtgtgtgtgtgtgtgtgtgtgtgtgtgtaatatattaagctatgacaagtgatgagccttggaaatcattattattatttttttttttttttggtttttcgagacagggtttctctgtgtagctttggagcctatcctggtacttgctctggagaccaggctggcctcaaactcacagagatccgcctgcctctgcctcccaagagctgggattaaaggcgtgtgccaccaatatctggcagaaatcatttttattttagaaaattttgtatctgtgcacttcagcttattgtataagtaactcatatcttttggaataacaagcctttttccattttagaaaagaataggcagtaagtctgcagatcttggtgtattgtatcttttgtagttgctactccttggggtcaatcacatctccctatgagtcctgatctgtaacattctgtttatttccatctcatatataaatgctcgcaacaggcactctgtacgaattactccactggatctatctagttctctttgcagtcttccattacttgggactgtccataaaagttgcttttagggaaacacagcagtatgatttgtcatctcttccagtcctcagaacaagagattcctgggaaatttaacatcccatttttcattttgcctgtaagtctctttccatcaaagtttaccacaaagtgtgagcgatgtgcttctagttcatatgttacgcttttccattctaaatataagcggtgtttgtaaaggaagggaaatatttttccttccttcctttcttttctggcagggtcacactgcatagcccaggctggccttgacctttcaatcccattgcctcagcctcctgcatgatgggatgacaggtccacgccaccacacctgctgaactcgtccttatgttgcagtggctgccgttttgctatttttctatgcttcatttccagtttagttgacattgtccttattaatccacttcctgttttgatcccctacctaatggcatgagtactactacatgccaccacactgcatgatgacagaatcaaacccattttacaggcacttcaatactatcagtgctcagctctgtgtagcattttcatacctatttcagaagactccaataagctgatagcattactatttctattttacagacagaaaatcccaagactgaggaaagtaaagaactttggaaagctgccctgagtgccaaaggagctggcaggagctgttttctgtgggttgttatcattactgtaacatccaacatcaactaggaagacaaagtagtacgtgactcaaccataaacaaagcacgagacagctaacccacggagacccaggcacggagagtaaaatgactcaacttctcatctcagttcttctgtcacagactagactgtgacatctcagctctcctgtcagactccaggactcactcaggaacgaacttcagaatacttcttcctcgcagggcagaaacaccatgcttcttctcctagcaataggactcaaaattaatcacagacaagctgcttttaaaacatctcagcgtggggtttcctaaaacattttaaattgagatgtttgaagaaggaggaggagaaggagaaggaagaagaagaagaagaagaagaagaagaagaagaagaagaagaagaagaagaagaagaagaagaagaagaagaacaagaacaagaagaacaagaagaacaagaacaagaacaagaacaagaacaagaacaagaacaagaagaacaagaaggccaagcaacttggtcccttagcagctggtgtgatgtgatgatgtgatcagggcttcccgactcttgattgtaatcaaattttgattcccccccacaccctgatccacctggatattcactcccaacttagaaatccaccctgaattctcactgtttccctctagaacctcaggcaccttctccatgagcctctggctattgcttcccttgtagacctgacacgcagatgatatgatgtggaccataccatttttttacctatcagccaaaggaggcctgtacatggtgatgagactctccattccttccttgtgactgtcataagtggcacagatgtctagctgactgccaaagatccttgctctcttttcaaagtgacgagtggctgatggagcttgctgccaggtttgcaccatacctccttattcctcccaccatacccactgtgtatcaatggaccttaggaacagtcaagacctaaaggaaacttctcacactatttttgagttgaagaatttgataactagatgtagcatcctattcacccactgaatgatgccagtgcaacctgaaagccacagtacggcagagcactgtgaaaggagtgaacagattccctaaatgtgttcttggacatccacacacgtgtcctggaacatgtatgcctactgtcaagcaattgaatttgaatttaccacccctctcctacacacacacacacacacacacacacacacacacacacacacacactgcatgtgcctgaataccatgtcacatgtgtaaaggtcagaggacaattccctggagttggtttcctcttgttatctatgagatacaggaactgaactctagctactgagccatctcatgggcccaaccattgcaactgttaatgaggaaaaaataagagagtcaaatacacctaaaatttcagcacatttataatcttgggaggatgacaatgaatttgaggccagcctgagttacagagttggttaaagaccagactgggctatagtaaaaacaaatgaacaaagacctatctcaaaacaacaacaaacaaaaataagagaaaaaaataaataatccctctgtagtcttacagcagctactgaccgagttcctagcctggttttgccccaagcctgctcttctgagtgagctacggcaattctaaggcaccttttctctctgatgcctgtaaactgcttcttcattccatttcagacagctgagcaatctgggcttcatcagggtaattatgggtctaagagaaaaccaagacgtttgttcacctgcctccaggcagggtagtgattgttcttccagatacaaagatgtctcccatggcccaaagattctcacaccgagggtgactcactggtggtatctttaagggagtcactgtcatccattcttagtctttctgcctataaaatgggcactatgatgtaaacaggataaggcaagaccttcttcttaaaccttcttctgaaggttgtcatggtgacaggatcacctccactgtagcatatgtgatagagttaaatggtcactactacttgattcttgaggctactgaagttctcagctccagacctgagcctcaagatacctcacagcttccacctttgccatcttaggatactcacactctgtgaggaggctaggaagccaggagtgagccagagacccatgaagaggggaaggagggctcccaacagtaagcatcacggcactggactcctgcaggaggtcatcttcccacatcaccccagccactggaagctgtgacatagctcccccaactaaaagccacagatgggcaatgcagctggctggaccaaacagccagactgctgaaacagggggaaaaaaaacttgcaaaatcttggaatgtattagcctcgtaggacagccacagaaatttaccacaaactggacacctaaaatgacagaaactgttctcacagttttggaggccaacagctgaaacaaagtgtcagttaggcggtccttgctgggaagatgccaggaagaacccttcttggatctggtagtgtctggctggcatccttgacattcctagacttgtgggagaatagccactctgcctcagtcttcccgtggctgtctctgcatccttgaggcccctcccaccatgatacccgtgatggggacttgaaaggatcctaacacaggataactgcatcttagcaagattagacctgaaaagacttctctttaaatcaaatacgcaataaataaataaataaataataaacaaatcaaatacgctcacactccagagctcaggactcttgtcaactgaacaggtcaattcacagcaactgctcattagaataaaaacaccgtcattttcctacttcaaacttagaaagaaaaatgaattgggcttttcaagatttacttatttttacaagtattttgcctccattatgtctgtgtaccacacccattcctggtgctcactcaggccagaagagggcattgggtcctgtgtgatctgaatgggaatggtctccatagactcgcctgtttaaatacctggtccccagttagtggaactgtttgggaagggttagactgtgtggccttgttggaggaggtgtgtcactggggataagctttcaggtttcaaagaacttgtgacattcccagtgtcctctctgcctcctgcttgccagtcaagatatagaactctcatctttgctctacaattattgagtctaaccttctgaaatcataaacccaattaaacacttttcttttattgccatggtgttttgtcacagcaataaagaagtaactaagacagatcccttggaattttagttatagatgaccgtgaggtgctagaaatcaaacccaggtcctctggaaaagcagctagtgttcttatccactgagtcatctcttcataccaggaagataaatgtaaactaagaaaactaaaacaaataccacattgttaaaggtaatgctatctatgaagatgtcatgtctcaagatctcctttgtagaaaatatctatgtagaatcttatcattgcttattacttctttctttcttttcttttcttttttttttccagtttttcgagacagggtttctctgtggctttggaggctgtcttggaactagttcttgtagaccagtctggtctccaactcacagagatccgcctgcctctgcctcctgagtactgggattaaagatgtgctccaccactgcctggctgcttattacttcttattactattagagctctcaatggtatgaaagaagggaattgtgtgggaaggagaagggaacaaagagagggttacataagagtgtaatggaaacaagatagacaaatgttatttgctttcatgtgaagaatataggtaggtgtgtgtgcgtgtgtttgtgtgctcaggtgcacgtgtgcatatgagagacaggaagaaagggaggggaggaagcagaggaagactacttgagatatggagggaactaacacaaaggaaaagagaggacaagagagggtcgtggggagatgaaagtgagcgtagtacaatgcatatcattttacttcacttgaagatgccacagtgagatccagcagtctgtaaactactacatttttaaagccttgatgctagtacaagatgacatttgctactcactggacaccatcaaatactctaaacaccttcatccacacctagttgtttaatggactaaagccactctttctaatttgtgtacgccctttcttctgtgtggtgtcttgtctgtgtaaagtcacagcctccttggagtttctggttactgttgtcccacttatttctgtctgtacagatgtttgagaggagtggcctctgccagcttcctctatttcctctgcgttgactcaatctctaacccggtgagacctgacttccttgaacagtccctaaaactgctgcctcgggagattccaccaaccaatggctcctgcttcacccttgaaatttggcatctggactttcactgccccacaagctcccttttctaatgcatgtagcagtttgccacatcttggccaaattcttcctcctctttatagtctttatagttctctgttagtatgactcatgtcctgggcccattcatttacttttcttactatacaactccaggagaaaatgtatcctctgtgtgtgtgtgtgtgtgtgtgtgtgtgtgtgtgtgtgtgtgtgtgtgtgtgagagagagagagagagagagagagagagagagagagagagagagagagaggatggaggtcagataacttgcaaggagtcagatctcactgtctaccctgtgagtcctggggttttaagtcagttcattgggtttagtggcaagtgcctttacctgctggaccatattaatggtcccccaaaatgttccattcttcagtccctattcccacttcaaagataacttcccaaccaatattttcctaatcatgagcccatgacctagggcccaaagcccaagtctgtgtctcaactgttctgtggagacggtgtgtactttgcatgcatctgaatttgtcagggcagtattctttttctatttttttcttttttgcagatttttttaatttgaattagaaacaagattattttacatgtcaaacccaggtccctctccctcccctcctcctttaaccccccccccccaactaacaccctacctatcacatctcctttctgttccccctgaatggtgagaccttccatagggtgtcatcagagtctattgtatcctttgggatagggactaggcccaccccagtgtgtcgtggctcagggagtatccctctgtgtggaatgggctccacagtacacacctatccttgggataagtactgaactactacaggaagtcccatagatttccgaggtttcctcactgaaacctatgttcctggggtctggatcagtcagggcagtattcttaaataaaagctctacaagagaaattcaaacttatcctctcaaaactaacttttaaattccaattttattaatgcatttacaccacctttatctcatttttccataaattccaatgttattaaacgtacaacactctgaagaaacccttaaagcatagtatctgcattacatatatgcatgccccaaacacaaatcaaaaaccttgaataatcccatcagccagggctaacacttatgatacatccttctagcccttatcatatgtattcatctggttattgccacagagatatgaacatgtttatttttcaataaaacaatgtcatgttatacatacaattttctgatgctctgaaacattatcagagtctttttaaaactttcttttctttcttagtgtaaatatctatgacatacagactttcacattgaaatatccagcagtgacctctcttacattcagtaaaatggcagagaaggtcaataaacatcttagactacatgtgttcccaattcatttttttacaaacagtatcttgtgtaacccaggcttgtcttgaactcctgattcacccatcttcatattccaagtgtgagtaacatttgcatccccaattcaatttttttttttttttttgtagttcaggctgtcttcaactccttatgtagctgaaaatgatcttttttttttttcttttgtttttgtttttcgagacagggtttctctgtgtagctttggagcctatcctggcactcactctggagaccaggctgacctcgaactcacagagatccgtctgcctctgcctccagagtgctgggattaaaggcgtgcgcccaccactacctaactcacaatttaatttttaattcattctttcatgagcttcctattcagacattttcatctctattaaaagtgccaatatgtatctgtaactccaactattgagacattttgattctactctcagaaagtgacccacactgcaccaaacccatcagctctagctccaaaattcagttccaggtgcctcttctcttcacatccagtctgctctcaccctatctgcttagtctaaacacagtcccacatccacctgatctctttgctataccccttgtttctctacatagtagaatacttttttgtttcatgattgtgtgatgtgtgtgcacgtgtaagtatgcctatttctatatgcaatagtatagattatgtacacgtgtaaaatcagaggccccaggctaactctggtgcttttttgttcactctccatgttataaattgaggcagcatctctggctgctggtctggctagtcaggttgatccaggtattcctgtctctgcctcctgcctggaccaccatgcctatctagcttttactggggatctgaactttggtcctcatgcacgtgtaacaagtgctttgcccacctaaccatctttccaacctctagattaatcttttaaaaacaacagtcaatcacttctttcttctattccatttagtaatgctggagctttttctaccgccgctagggcccctctatgagtctaagactgtcacctgcttcttcccagctctactcagctccttccctttaccccactcacatgcactcctgtttgtcttctatggtagtctgaatgtaattggcccccataagctcataggaagtggcactattaggaggtgtggccttgttggaggaagtgtgtcactgtggagtcaggctttgaggtcatatatgctcaagccatgcccagtgagacagaccacttcctgttgcctgtggaagttatagacctctcagttacctctccagcaccatgtctgcctgcacgctgccatgtctcaccatgacgataatggactgaacctctgaaattgtaagccagccccaactaaatgttttcctttataagagttgctgtgggtcatggtgtctcttcacagcaacagaaaccctaactaagacatcttcctgtacaacctggcccagagatgatctctcagacactttagcttgggcatgctgtctaaactgtccccatcgcatatgcccttttcatatctttgaacagactttactatggcagatatatcctcgtttagttgatgctttgtttcttgtctcctctttggaatctttcttcttttaagacaagagcctgacctagtttattcacaactccattcatacttagaacagtgcacagaatcaacatgcagaaaccagtgagtaaacatatgcttagttgctttctcaagtcccactggttccctttcaatgtctgcacaccagaacctttcctcatcccaaatatcacttcacaccggaatggcttcagcttcctcactaccctattcagaaactccctagtccattctcacattgctcactgtctttcccgccttacaagtgtcagcaacagtcctgccctacagagcctggcagagacctcgcctctttagggatatgtctttacactccaaagccatagcctctcccattctggttctacccttataacctgcatccagcctcataatccaatagtgtcctatattctctaacttgccatttatgtaaacttccccaatccaggagataggttatcttgtttttaaatttcctataatgcctagaaaattcatggacaataaaaaaaattctgttgatctgaatgaaaatatcaagtggagaacaagaatgagtagatacatttgattgcagaataggtcaattcaattgcccttctataggaagaagagctgccaccgaggcctgcaacagttatattagctagcaggatatggactgcagctttgccagcagactttgagcctgcattgtcctcactaacataaaggagagaaactcactgtggtgcaagttagtgcaggattgctggcaccccaggactccagcttcctcagtctgggcccacctgagcaacgtcatgatgagtacccagcttctggtgaagattcaggttacccagcagagacctgagtacatatgtagagacagatccagtgccccgatgaaggcatgtgctcagtgtggagcacaacagtgcaggacagcaaggtgaggcagaaaacttgggagaaagggtttgtacctgtggtgatatattgtttatgatctaatgaagtcaccagggatcaaaatgcaaagctagcctcagccatagagccagacagtggtgatacacacctttaatcccagaactcaggagacagaggcagatagatctctgtgagttcaaggccaccctagcctacccaagagtaaattactctaaagagtaacagagctcacacctttaatcccagcactagggaagtggagacaggagtgatatggccgggcagagataggactataaagcaggaggagacaggaactcatggcattgcactgtgaggactcgtgaagaatgttgtctttgaggattggcggagacatgattgctatttcagcttgatagaggtaagagctactggtttggctgctttgcttttctgatcgtcagcttgaacgccagtatctgtctctgggtttttattattcgtgccacacatacctatggtcattcctctgagtgtcaatggtgtgagctatgatacaactgatagaccagacattcaaagcatggggtgggtggggtggtggtggtggtggtggtggtggtggtggtggtgatggttcagttacaccagcaaaacactcagacagctgaggagacacgagccctttgctaatccacatttctaagtcctatggcttggagacaaacatctttattctgctcgaaaaacatgcttttgaaaacaaacatgttatctagactgaaacgcttatctcaaaggcatcacaggatacagtcagctgagggagaaattaaaaggttctttaaaaatgtcctgcctggccattccaggaaatgagtagcaagattatatagaaataggtcgttaggagtcattttattgctatgttcctttagcagaataatactagtggattttcccctagatctgtgacttatctaggcttaggttcttagccacttcagcagtgttgtgtattgattccatttttttttttttgagacagggtttctctgtgtagctttggagcctatcctggtactcgctctgtagaccaggctggcctcaaactcacagagacccatctgcctctgcctcctgagtgctgggattaaaggcgtgagccaccaacgcccgacactaattggaattcttaaattaggaaattcctaatttcctaaatgcaatctttgaaaagtggctggctactcccataacacttgtggccctattgaaccattagatcttgcaggcaggacactgtagtaggtcacagggtttatagctgggaaataatgatattacctttttcctccagtagtactctaactttcagaaccatgaacactagtcagtagggatgaagcttctagttagtccccagaccaacgtttttcatgtttgataacagacttaacatcacgttgtgaagaacaactaatagccttggcaatagggtgtgatgcttggggtttccatggaacccctttgaccaacaactcaaaaagatgtaacccatccctggcactggaggttttacttagtggcatacagtgtctaactgtgacattgtttcccctattatttgatgactccatccatatccctttcatatatgtgtgtattttaggaaacatctataatagtaggtttctatatggtttttcaaacggcctctagtattagttgtccctccccaaatcctttaccgttctctcccaccccacccccacttaatactgctattttattttcgactttgtctttccataacaatatattctactctcctttccttgggagatcttatcctcccacctactcccttagtaggcacttcaactctgtggttattcaaattgtagcacacatttcaaaagcttaaaagctaacatctgcatataagagaaaacattcagtatttgtcctttggttaccttactcaggatgattttttttctagcttcatccatttacctacaaatttcatttttcttaacagctgactaggatttcattgtataaatgtaccatattttcattatccattcatcagttgatggatatctctgttgtctccaatttctgcctattgtgagcacagcagcaaagaacgtggatgaacaagtttctttacagtagaatgtggagtcctttgggtatataagccatagagtggtttattggatcttgaggtagattgattcctagcttcctgaggaattacctcactgatttccatagtggctgcaccagtaagtgttctgcttcccctaattcttgacggagtgtgctatcatttattttattggtcttagccattctgactggtgtaagatgaactttgaaatagttacaatttacattagttgatagctaaggcatcgagcatttctatatttctcagccattttttatttcatcttttgagaacgctgcttagttctgtatacaatttcctaattaggtcattgttttgtttctgtttttctttttttgtttgttttttaggtctttatatattttagattctagccctctatcagctgtataagtatgtatgtataattggcaaagatatttttccattctttttgtttgtttgtttttgtttttggagatagggtttctctgtggctttggaggctgtcctggaactagctcttgtagaccaggctggctttgaactcacagagatctgcctgcctctgcctctgggattaaaggcatgtgtcaccacacccagcttgatcttttttccattctataggctacctccatgccctaatgatgatgtcctttgacgaacagaagcttttcagtttcatgacccacaacatttgttgagaatgctgtattcttctccaggatgtacttttggcttcttggtaaaaaaaaaaaaaaaaaaaaaaaagcaggtatcaacaggtgtgtggacttatgcctgggtcttccatttgattccattgatcaatatgtctgtttttatgctaataccattctgtttatattacatctctgtaatacaacttgaaatctagggtggtgatacctccagcagttcttttattgttcaggattattttagctatcttgcattttttgtgtgttcccatatgaagttgaaaattggggggggggttgattttagttttggttctcttttttaatttctgtgaaaaactatgttgtacttttgatggggattgcattgaatctgtagactgcttttgtagatgactgttttacattaatcatacccatccacgagcatgggagatctttccatcttctagtgtcttcttcaatttctttcttcagtgtcttaaagttcttattatacaagtttgtttgtttccatttcatttacttaatccctgagtctgattatttcttcctgtcataacagaactttcaagtgttgctaagttactaatatgagatctctctaagtttttgtgtaggcacttagtgttgtgaacttgcttcttagaattgctttcattgtgtcccacagatttgtatatgtgtttttattgttattcaattctgaaaaggccgtaatttccttcttgatttctgttttttattcagtggttagttgctccgtttccacaagtttatatattttctactatttctgttgttgttaataaccagctttaatccatgatggtcaaataggatctagaatgttatttcgattttcttgtatttgttgaatataagaaatttatatttgtacccaagtatgtaatcaatttgggagaaatttcaagagctactgagaagaaagtatttttttgtgcttgtgtgaaatgttctatagattgtctgctaggtccatttgatttatgacattattaactccagtatttctgtttagcttttgcctggatgacctgtctgttagcaacagccaggtattgaagttatccactatcactgtgtgaaggtcaatatttgtttttagctgtgacagtgtgccttttatgaatttggatgcctttatgtttggtacaaatcctcttagtggatttttcctttgatgagtatgtagtgtccttccctgtctcttctgattattagtttttgttttgtctatttatcagacattcaaagagctacacatgcttgcttcatgggtccattttcttggaatatctttttacattcatttacccagaagtaatgtatatccttgatggtaagacatgtttcttagatatagcaggaagatggatcctgttttctaatccgatctgctagtctgtgtcttttaattgggggaattgggaccattaatattgagagtcaggaatgagcagcttttacttattcctggtttttgttgttgttgttgttatggtgtgagacacatccccccttggttttcttgtctgggttactgaattcttatgttttctcggatgtggttaacctcttaggttgaagttttccttctagtgctttccatagagcttggttggtagaaattgcttaaatttgttttttatcatggtatttttttctttctccatctattgtgacttttctccatctattgaaattttttctgggtatatcagtctgggctgctatctgtggtctcttagagcttgtagagcatccatccaagcccttttggcttttagagtttccattgagaaggctagcctttatattatgctatttggtctttttcccttgtagcttttacaatcctctctttgttctgtatatttaacattttagttactatgtgtcatggaaaacttcttttctggtcctgtctatgtggtattctacacagttataccttgatgggcacctccttctttagattgtggggattttcttctatgattttgttaaaaatatcttctgtgctgttgatctgggctgctgtagacttgtttttttcatagtatcccagatttcctggctgttttgtgcctggagttttttagaactaacattttctttgactgtggtatccctggattctgtattgtcttcaagatctgaaattctcacttccatgtcttgtaacacatctttcgaacaactgtgttctaacggtcttcattaaggcatttgttcaaatcctctttaagtttcttgaacatattcaaaaattgctactttcaaggccttgtcttgtgcttcagctaaatagcatttctcagggctaatttcatgggatcactggcttctggaggaggcatattgtttgggatgctcatgtttgtgttttagtactgggatctaggcatctggagttatggagtttgaggtgtttctgatgtacatatctagtcatgtctttgttggaatgatgctcaattctttggtcactattgtccagtagaagagaatgcttctgcaggtcagtcagtgacactgaatggaaataggctaggaagaagggctgagagagacagcaagaaagagctaggggaccagggtgtgcaccaagaggaagaatccccagagagtggaggatgagtaggaggaagggctctggcaggcaggctgtagtagagctaagagtcaggctagagagactggaatggaagataggaagtataaaaaaaattgtctatcattgtcttagacaatgtggctactggggtccctggtagaaagtgttctgccagagggatcctgggtcttcagcaagagcttaattaattaattttttaatcaagagataagagaaaaatggctcatctggtaaaagcctttgctggcaagtctgacaacttggtgattcaccagaactcacatggcggtcctctgatctccacacatgttcatggcactagagtgtccacacactagtgcttttgtgttccttatacacaaaggcatatgcaaaagcaaaaaataaaaataaaaaaataaaaaaagacatggaggaaaaggtagtagttgattacagttctgcatttcttaatctaactgtagttggactttgtgagagaacaatggagggggaagccaggaagcttttaagagttttctaagcagagaggcatgttttgcctcaagttccaaccccatagggaaaggaacacaaaagcataacaaaatctcacattctctattccctcatcccagggaaaaacatacagtaagtggtgtaattcaaaatcttattttgcaatagaattttattttaaagggttgagatttatacagtcaaaggaggtactgactaaattaaactgttaagcaaagtaaaacaacaacaaaacaaacataaagagaagaaaaaaaaacacccacaattcaaggcctagtaattaatcaataaagaagttgttagactagcctgatagctgtaccattcacctacttattcaagcaataaggtagaaggaagggaaaaaaacatgaaagtgagtgaccattatcttgggttgcactttaaacaaaaaggagcaatgtatggctattttcattgctaagaaacaaacaaacaaataaatgacttcagaggtcacccagtgacccaggagggcaactgaacaggaggttagaaacattcaggcaaggagtgaaaattagcaaataaacacttaaaagaatgctacagccttggttccgggtagggaaggacctgaattcaggaaaacagtgggagcagaaagtgatagacctcttctggtgattgacacggtaatcaaaaacctgaagaactagagctgggagatggctccgtgggtaaggtcaggaagacctgagtttggatgccatcatcacccatgtaaaaagcttggcatgatctcgtgctcctgtcaccccagctcttgacaaccagcctaaccaaaaccagaaaaccaaagagtgtacccattgtccttccagcttcttcgtgaatatatgggcacacacactgacatacactgtacacacatgcatacattcacatcagaaaacaaattatttcttaagcaattctactactagaaatgtatatgggagtacttgcagaagctcagaaaacatgttctagaccgttccatcaagctctccattattttgcaccttaatgcccaataataactacttcagtaaatcataatacactcatattatttgtaatatagacctacagtaattgatttggagagttgtctacacatattaagcttaaagattataatgtagcatgcaaagacgattttggttttgtaaaaattagaaggaagtgtatccaaatgttaaaaactattaatttatgagtggttgaaatgtggctattgctttgctttttgcttactacgatttgctattttacttttacttttagatgtttttaaattctacaaggaaacagaggaatgtgggtcagggagatggctcagcaggcaaaagcacgtgcttgcacaagcctgataatctgtgttcagtaaaatgcctgcaacccaaggaaacagccagatacagctatgcacatctgcaatcctggcactctctctgtggtgagatgggaggaagagacagaagctagtgaaccagctagcctagagtactctccagcacgaacaagaaacaccctgccttacttagtaaggaggcaaatgaaaacctgtagttggttttttgatttgtttttcactctttggtcttggggagggggcacaccacccagctcccaaataaatacatggagtattattcttatttataaatgcctggcattaccttggcttatttctggctagcttttctttttctttctttcttttttttttttggggggggggtgtttcgagacggggtttctctgtggctttggaggctgtcctggaactagctcttgtagaccaggctggtctccaactcacagagatccacctgcctctgcctcccgagtgctgggactaaaggcgtgcgccaccaccgcccggcctggctagcttttcttaacttaaatgatcccatctatcttttgcctctgggcttttacctttcttttttctatatctctttccttcttactccatggctggctgtcttgctgggtgtctggctcctgatgtcctcctctccttcttttctccacccttccttcttctcctttgtattctctctgcctggcagccctgcctatccctctcttgcctagctattgaccattcacctctttatttgaccaatgaggtgttttaggcatcattaaacaaatattccacagcataaacaaatgtaacacatcttaaaaataatattccacaagaaaaactgactcccaaaagttgtcctctgatctccatgcacacattcacacacagtgtcttctgttctgcttgcaacttctgttctcccttctgcgcttgggtctgagcatgcacgcatgcatgcatgcatgtgttgctatttgcagatggacctcaattaaaagaatggagacctggaagctgggcgtggtggtgtattcttgtaacccaagcacttggatagatgatgcataaggatcattatgagtttgaggccaatctgggctctgtagcaagctgacaggtaataataataagcctaatgcttacaggaccaggaatagtatatttctcttgctttaacctttaatagaattacccaaaatattattaagtatctagttgtttgctatggaaaagatccaaatggccctacttaagagttctccagcaaggagacccagtagggtcaccttctgccttttcatgcccctgtgtgtttgtgacatcatcccataccctctctagctctgtgtagagagctgagacaggagacctggtctctgaactctacctctccctggggagccatatgatgctgtgtttccactccatgggcccatgaggaagtaaacagtaccttcacaaatgcatgtgaaggatcctctgcgagacacatacttgcttttaaccactgaggtgactgtctctccagccccaagttgcttctcttctttaaactttattttattggttattactgtgtatatgtatgtgtgagtgaggggtgcaggcatgaccaccaaaggacaactttatggagttggtcctttccttccacctccatgtggcttctgggcatcaaatgcaagtcaccctgcttggataacaagaccctttaccactgagccatctctccatcccctttctttttcttccttccttcctttatttctttctctctttcttttttatttcttcaatactgggcttagcacatgctggacaagtgctctgccactgacccatactcccagccctctagttacattttatttttgagacagggtctaagttacagaggctgcatttgatcctgtgaccctcctgcctcagcctcctaagtagcttgaattacaggttggtaccttggggttgttcttgaatgaaaccttcatgtaactttattcttttatagcacctggttttatcttccacaaaaatcatcctaatgactggtatgcctaatgctttgttccacttttaaaaacgtgtaattgtattattatcatgtgtgcatgctgtgcatgtatgaatgtgggtccatgtgctatggtgagtgagtgtgtacaggtcagaggacaaccttggggaaatcagctctgtccttccattgagggtgggtttctaggtggtcagacaagtgtttttgccagctaagccatctgactggcatgtctttctctttttttatttttttttagaaaattttaaatcttttattgtttcatttttattcacaaataataactattgagtatagtgtaatacttcaatatatgtacaagatacactaatcaaataaataataagcattttcaactgttatcatttctctattataatttttaattaattaatttattatatatacagtgttatgcctgcatctatccctccctgcaggctggaagagggcaccagatctcattacggatggttgtgaaccaccatgtggttgctgggaattgaactcaggacctctggaagagcagccagtgctcttaacctctgagccatctctccagtcctctctaatttttatttgtgagatttcatacatatacacaagaaaatatgattacagccacccatttccttcctctgactccccttattttccctcaacatgtcccccacccaacttcacgactttttttctttttcagttgcactaagtccaattagtgctgcccatgtgtgcatggatgtggggccaacccactggtgcttcaaaaaaagaatgattcctcctgctccagtagctatcagctgccactagcgcctcagattagggggtggggactagagagcacctccctcgccagtgctggaattttgactgtctgacacaatacttactagatagtaaatattgttacttctttactttaaaacaaaaccaaaacacatcatggtgtggtgagtaggagggcaggattctagagacagcctgaacataaatcccagctctgaccttcattagccgtgtgagatgggaatttacctgacttgttgagttctgtttccccaatttatcaaatgaagacagtaattgttcttcattcacagaagtgggtgagttagggtggaaacatttagatccctacctgccacatactacgtgaggtagtttggatgagaaatgttcccacaagcttaggtatttgaacacttgatccctgtgggcagatctgtttagggagttgctgcaaacctgctggaggaagtgtgctttaaaagtttaagccttgccccccttccagattgctgtttctgcttcatgtttacatttgaagatgtgatttctcggcttcctgctctgcttgcttgtagccatgcttcccctgcctccatcatggactctctctctctggcaccataagccaaattaaatcctttcttccttaagttgcttttggtcatggtattttatcacagcaacagaaaagttaacaaatacagtaagaactataaaagccatattttctatttctttcaatcctggctgtccagaaggtcattcatgcccaccaacagtttatatattttctttctttaaccaaagttcttattttactttaacatctgatcaagttctacacctattctgtgttggaaagaaacaagtgatatgggatatggtttggtggtaaagtactttcctagcatgcataagaccctaggtttaatacccaacactatataaaaggaaaaagaagccaatgtattatttaatgaatcttcacagtattaccaataatttccagcatctacaaaagcagtaaattccagtaatcaaagatgtaattaacaagggattactatgataaataatacagcagttcctaaaaccccaaacacaagcattattgagacaacctaattcagatctagtctttcttctgtatgataattagggaaaatctaaaatcaagacaaacataaactttactgcaactcagaacaattcagtggtagaattttgtcttctatgtctctaagctacaggttctacagaaatgtttcagtacacacaacaaggggtaccacctcatgagatactcctaccacatcctacctggcgatttttagcacttgaatctgggctcatgagagcacaagagagcctgaaccaccatggggagacaactgctggcagccttcttgacatcctctggctttggctctgtccctgcactgggcaatgctgcttgcaggaagccacagaaatctgaaagcagtggggaatatttttcacagactgtaagagactgctcattccttgttgagactggggcatagagctgagctctttgcaattgtgattttttagtatgtcaaattgcaaaatttcatcagcagaaagaacagtagtccacctgacaaatatcttatggaatatcattgttaaataaacaggtgaaaatatgaacttgcactaaaagtcttaatggccacatttcaacacaatctcacttttggaatttgacctattttaaaaattaatagacacacatgtaaggtaaaagattttctccatgtttgacactgcaaaacatcatatggtttacacatatggactactcagtaacagcaacagaattgtcaaatgctgttactgacatgatttttataagttaaattgtttttaaaggaattcttataatacgtggatcaaaacagcaggggcttaatgaagagtgctgtcctaggagcagtcggtagtcctagccgccactgttgatggcaaggcctttaacaaatttcatggccttgtgcaactacatctctggctttactttccccttctatctagtttcatttccctctccatgctaaaatatctccagtgtaggggaggaaaggctttctttggtttacaatgtcaggtcacagtccatcgttttggggaagtcaaggcaggaactcaagcagctaatcatacccacaaccaagcacaaaaggggcatagacacaatctggcttgcttaagttgggtttcttcactccgtgcagttcaggaccgagtccatgaaatggtgctgcttacactggctaggtcttcctccatcgaataacaatagggaatctaacacagccatgcccacaggcaaaaccaacgtagacaacctgcttcccaggcgattccagattgtgtcaagttgacaaagctaagcacaccttctgtacaagaggacttgagtgccctatggtgtgataacacaacatctgaaacacagtgtgtgatgtttaagtggcgggatttaatattatattaccactaggcaattctttgttttgttttgttttgttttgttttttgagacagggtttctctgtgtaacaactttggatgtcctgtaattcattctgtagaccaggctggcctcaaactcacagagatccatctgtctctgctccctagtgctgggattaaacgcacgcaccaccacagcccagctcactagacacattcttattaatccactcttctggaagttattcctgtaaagcccactgagtaattcttgcgcccattatacagaatgacataaaaagaggaaagaaaactctaagagcaaataaatacaatttatcctccttctggaagattaaaaaacatcttatactttactttcctaagtgggcatttggtcagatcagaacactctgttccaatgagtatctctgaggttctcagcacagaactgggtacgtgagagacagcagccccaagaaagctccaggtggccattgacatccccatacccacccccaaatgatctctgcctacaaaacactccaacttcagctttctttcttaggcttctgcagatggtgatgttagagacggcaatggccaggatggagctagcggcactgatacagcagctaacagttatttaacatttactctgagccaggcattaataagcactctgtccctactctactccacttaatcccctcaaagtcagaagaggcaaaaattatggtcagatattatgattattctcactgacacaaatgccaggtgttgtggcacacatttgcaatcccagaaattggaaagctgaggcaggagaacttcttggagttaaggccagtttgggctacaaaataagactttgaagagacagagagaaggagggggaggggtcaaacgagaaaaatttaaaaatgtgtatgcccaatgttatatatttagtttgcaataaacagcctatctgtaagcaaatttgattgtaccatggctcttggtttttctcatatttatggttgtgagcctagtctttaacagctgagccatctctccagccccgatcttggtttttctaacactgttttgtttgggtggttatttttgttttgttgtttgttgttgtgagatctctatatgaaatctggactggcattcaacttgtgacatctggctcaaggtcttaattcttaacccctgggttacagcaaccccataactccttgcaagagtgcctccggggttaacttaggcctgggtcactcactctagatcagtatcactccacctgaattgctaacatcttcctgcccttgttcctgtttcctgacttgtttctttctcatgacagggacaaagtacagagaagcagccatgcaaccatgacatccaccaaaaactcctatgaatagcccttatggccccacaacagctgtgaaaacccctgattcagaaagtaagcaccagtaggaagactatctgatataatttatggtttcagactagcaccctttaacctgcaacatttgtatacagtccacattaataattaaactcatttgacagatgaaatagtgtggtgagagattctggtttgcccacaactatgaagtacagctccatagaccctcagaagtccttaactgcttactatcaaggatggtgactcctagtggctcaagctccactcactagcagcccgaaaatgaacttactgtggatcaatttcccacaggctccactaaaaacaaacaacccactggaaatcttccagagggctgcccttcacagtggagttccacattatcttttagccaggcagtctagatttcccaggtcaaggcaaaaatgccccctgatcacttgtcagcagttttcagtggaggaagcactgtcactcaagtctactgtatacagatgtagtgtgtgcaactcttgattatacattggagatccgtgtccttcactttgctggggtgctataaatctttaaatgtcagctcatgcctttttgcttatttaaatgaagaattttaaaaatcactttttccacttctttgatggctccctttggaccaaggaataaaaatagcgatgccatcaggagccaagatcttttctgggggcagggggttgaaaaagtcctaaccctggcatagagggataggcctcaaagcaaagctgatttcaacccctgtgctcctttccccttttctgacctggaaggaaggcacaatttgtaagacacacacacacacacacacacacacacacacacacacacacacacacacacacacacacacacacacacacacacacacacacacacacacacacacacacactcactcactcactcactcactcactcactcactctcactcactcactcactcactcactcactcactcactcactcactcactcgcactgcgctctccgggttccgccacctgtcagaacagcgcgggcggctcgagccacgcggggttggggaggtggcccgagtggctgctcagtgaagcggcacgggtgacggaggacactgaggacgtggttgagtcccggtgcgccttgccgcggactcgtcttacctgttgatcttgagcgcgaaggcgcggcgctcggcgctcggcagcgtggccatggcgcacgcacggctcgccggcctcgggactcgcgggggtgcggagggacggggcccgaacgcacagccgctgcagcgcccgtcgcgcccgccgccagcctcatctgtcagccgcgccgggaaacttccgcatttccaccttggcggcacagctcccgggggagggccctgcaccaccgcccacagcgccgcccggcctggcacgcaccgagcgctcgacgagggcgtggacagcgcgaggaaccgcgctccggatgctccgagtcgccggccgcaggcgcgcgcttcccgccgctgaccccgggcggagagggacgctggcgggcgagcgggagcgctgaccggaaacgccggctgcggccggagtccggggacaactggggcagcgtgcgcccggtccaggagcagcctggggctctggaggcgtctcccggagggttgacgccattcccgggacacgactgtttaaaatgaataagcaaaaccgcaatctcataggactccagtcaacttttttttttcccccagcggaatgcgcactgtcattcatgggacactttattataatagatctatcccaggagtgaatattatgagctatacgagataaaacttttcccccaactgagttcagtttcacaagaggaggaggtggaggaggaggaggaggaggaggaggaggaggaggaggaggaggaggaggaggaggaggaggaggaggaggaggaggaggaggaggagtccccaaaaggtgagggtggaaaagcatgtgccaagttgtgctgtgtgaacactctttgtgtgtctctacttgtcaacttgccttcgaatatacgaaaggggtgtgtatttttggttcaaagctgcagtgtctagatatggacgccacaagccacatgtggctgttgaccacttgaattttttggttagtctgaagtgagatgggttgaaaaatacacactgggtttccaagaccgtacagaaaaaataatggaaaatgtcttaatacatttttttgtgttgattgcatgttaaaaacgatcctttggaatctgttacatgaagaaacatattattaaagatagaactccacctgtttggttttcccctgtattaaatgtggcttgaattaagaacatgtaaaaaaaaaaaatacgtggctcacatttgctggcacattgttcttactggacagcactggtctaatacaacttaatttgtaacctaatagtaaaatacttgtgaaccatattttgtctgttcttcctttgcttttggttgtataggtagttgagtaaatcttcagagatggttaggtaactctccctttaaacacataagacagtgtgtatagcataacaataaagagactataaaaacagactaaaagaaaacaaatctttaataaaaaaataacataacaaaaccaaccattgtaatccaaactactcagaaagctgaggcaaggggatctcaagttcaaggcctgcctatgagacaaagtgagtgcaaggacttcttggccaacttaaggagaccagtagtagtaagtacttgcctaacatgctcaaggttctgggttcattcccagtgccattttctccctccccctccagctccccctcccccctcgcacctgccactgcctcccaagtgatgggattaaaggtgtgagccaccataatcagctccagtgctaatattttaaaaggcccttttaaaaaagctgttctttctgacttacaaaggtctcctaaagatatttactaaaatggaatttataaggaaatatttggatagaaaaatatttttaaaataattatataaatgcatcttcaatctgtaaacaataaataattcattgagaagtttttaccagagccttcagtccacttacagattgacttgtctgggtttctatatgtttatggcatgaacttccatatagaacaaaaatatacttgtttctacacaaacacaagtaaaatgtaatgagaacatctcacattttcagaggtttccattaaagaaacttgtgtgaaatgatcagcagaatataatgaaatcttacatcttgcctcaaattatactatgttcaacttagtatttgatacctaactatggagattagaccagcacagttgtctattcatactaagaaataactcacatcttcttaagggtcacttaactcatcaagaatgtgtaatctatgaagtaagcatcgccttttctgctcctggatgtattcacagttcaccagcaaacttcagaagtagccatccaagtgtcttcctcctgcagtctccctgcctctccagttccctattgttgagcttctctgttcattgtctgggcagagccaaggcttcccttcctcatttgcaggcctctgtgggccttcctctttctctatatcattgtgccattcaattttgtttttccttttcacaaaatcttgattgacttccatgaccaactaaccatatatcaatggtcttagattctcatttatgtttccccaaactttattttgctttaaattgcatctttcctgtattatttaacaaacaactaaataacacctgaaccaggcattgtttcaaccaggcaccctttataaattaacctgttaattaattaatccgtaactatgtaatatgaaatactatgtagtactatgaaatactaacattttctgcactctacaatggaggaaactgaggatcagactgattgcagtgacttgtctaagatcacagaacagtgagggcagagccacttctaatcctacagttctgcctatcacctggacacgtgcacttaaagtgtccattgtcaagctccacaaactaaaactctctagttcccctacccaaccagaagctgactatccctccataatcactcatttctgttgttggtgggacttcccagtatctcaagcttaaactttggagttatttagtaggggaaagccatcagtccaggctgggggcttcagctttgagttaactgtgatccagtgacacgcctttggattcatcttggaggaacatcaccgcttgctgctctctgaacttcataagagaaagtgtcagctctagatccaccctcaccttttctttgctgatctaatcacctgccaagggctgccatgcattctttataaagcaccacttcataagcataccaatgttctcactgcttccatcatggctcatgagttcagtcaaaataatgaagaccaaacatgaaatgacatccctgggggctggagagatggctcaaagattaagagttttggctgttcttctagatgctcctgagttcaattcccagcagccacatggtggctcacaaccttctgtaatggtatctggctccttcttttggcatacatgcagacagaacattgtatacataataaatctttatataaaaaaaaaaaggaaatggcttccgtgtgtgtgtgtgtgtgtgtgtgtgtgtgtgtgtgtgtgtgtgtgtgtgtatcccttgcttatcctggtttaattggtttctaccaactaccctaagtagagtctcagcagcctctgtgatcaaatgtatcttcccctcgagtgtgacaggccagcatcagtcaaagaggggcagatctgcaactcacgcccgagaagacagtgttcttctggggcttcccctatctctgctactttcccactctccttatcctgcattacctcccgtctctctccatcttcagtgtttgagacaagttttcatatcccatgagagggagaacttctttcagtctgctagcactctaattggctaggaagtatatctcactgtagattcaggatacaacagggtttggtctacagagaaaactgaggctgtttttacatctcctcccttcttccaaaaaaactatctccataatctcctacaattctccagattgtgctcaaaggtcaccttccacgatactgcctggctccttttgcaagtcttttctactccgtagcctgtgtctgtcctgatatactatatttacatgttgaaagattaagtgaatttgaatgaaatgaaaatctagtaagaggatagtaaagtaagaggacagtatacttttcatggtactaggcaggcagactacaagagaacactgttatatattttgcttgtttttaatttatcgctctacgctgatagcatgtaagttccagaagcatagaaatatttgtgtttggcccatggttatatctccaaagcctcacacatagttggcactcaattaagtaaatggatgcacacattcaataaatatttttttaacaggaaaatattctgatttttatttttgcatgttattctcaagtacacaattacaataatgtcacacatcccctatatgattttctttttatgtattttaccttttttacaaagtatacagagggagggacataaatatttaataggatatttctacagaacaataacttatattatgtccttgtaaaaatctgtacctctttaaaacatttaactgaaacatcctttttttagctttgctaatcacaattgttttaagaattaaaactaggttgtaactaatgtcagtacataacagtgactacttcattttctctttatacagacaaacacattttatattcacttgaccaaacccttaaataccttttaaaggcttcaatattgtattttaaaaagaaaagaactgtatatggttccagattatgtaaagagaaacataaagtgtgtaaagtgttgtgttccttatctctcagtttatttaaaaaatatgttgaatggtccaatcatttgtatttcctgtactgattgtagacaatttttaaactttataaatttcaatgttaggtgttttacattacttctagggagaataataaagtagattttaaaagttctcacaagaaaagacagagctttcaaagttaacagggcaataaatcaaatcatagttgtggtgcattttttaaagcacgttgcagaggctacaaaggcaaaaccaagttccccatgtcattcagaaggtagcaagatcagtatgagtattttaatttgcctttgccttttggttaatattttccagctctgttttgtatttatttcaagccagctgtcatggaatattacatttgtttatgctgcatttgtttaacaatgtaaagatgtgttgctttgttttaccttatctgcccgaggcacctgattggtttaatataaagctgaatgaccaatagctaggagtagagggataggaagggctgatgggaaaagagaatatgtaggaggaagaattaaggagaagggaatgcaaaaggagagaacaagggagaaaaagagggagattctcagggctaaccatccagccatccagccatccagccatccagccatccagccatccagccatccagccatccagccatccagccagccatccagccatccagccatccagcccagcatccagccatccagccatccagccatccagccatccagccatccagccatccagccatccagccatccagccatccagccatccagccaaagcaggaaaagtaggacatacaaaataaaaaataagtaaaaagccccaaagcaaaacacagatgaagaaaagcaggttaaaataagttataaggctgggcgttggtggcacacacccttaaacccagcactcaggaggcagaggcaggtgaatttctgtgagttcaaggccagcctggtctacaaagctacacagagaaaccctgtctcgaaaaaccaataatagtagtaataataataataagttataagagctagtggggcaagtataagataaggctgaacattcataactaataataagtctttgtgtcatgatttggggagtggtggtccaagaaagcctgctacaaccagcacataatatattttagcattttcaatataagatttggactggatccaaatgtgggtattcagcactcaggaatagtcaaactatactataaggattttgaattcatcaaaacacacacacacacacacacacacacacacacacacacacacacacacacacacgagccgggcattggtggcacacacctttagtcccaacactcggaaggcagaggcaggtgtatttctttgagtttgaggccagcctggtctacagagggagttccaggacagcctccaaaacaatacagagaaaccctgtctcaaaaaatcaaaaaacaaataaacaaacaaacaaccgggtgaattttctcatctcattcactactattattcaaacactctccaagtggtcaccagagctcaaggcatgcactgagagacaacaggagcaaacaatgaacaatactgttctctgacttcctagaactcacggtctaggaatgagacacacatacagaaggaaaaggaggcccgggctctgtggaatagcacaggaacattttgctgtacagaagtctgggagattgaggaagctcaggcaggaaatgacttattcttgagggatgagggaaggcaaagagattgacaccaacaagactggctttgttgccatagtgatgtgggaactgagacccaatgcccaagttcagtaggcagagaggagttattgaagatatctcaggcagaaaaaaagcgctatacaatacaagcacagagtaaggagatagcaaagtcctctcagaggaaaaaaagtagagaaaaatgaagctttggtaggcaggacctgggtgccaataacaattgctttttgcatacgcaggttattcctctgggagaaatctctttccagctggtattccacaataaggattctaactgtacccaggagattatggtatatcatgaggtgggcaatatgtctcctaatcctggcaacttttttcaaatttggacataaacgctattgctgatgaagggatgtgtattgttttgagaaataatttaggcaatacttatgtatgactttcctcatcatggtgactgataactcacaagaagcagctttatggtgaagggttttattttggctcatggtttgagggtaccatccattctagtgaagaagacgtggatgaaggatctggctcatgggcatcgcagtaaaatgtaagactccttgctcacttctgggcaaatcagaaagcagagaaaaggggatgctggcactcatttttctttttcattcagcaggatgggatgtactgttcatagttagggcaggtcttctccctcggttaattatccctggatatgtccaacggtatgcttcactaatactaagacatttcttattccaatcaggtttatattcacaactaactgttacagttccaatactcatatagagaggtgagatttatgggggaatcataagtataagtgctggtcccttagtctaggtacttttgcctctccctggaataccatatggctctatagcagtcgttctcaacgttcctaatgctgtaaccctttaatacagttcctcatgttgtggtgacccccaaccataaaattatttcattgctacttcctaactttaattttgctactgtcagtaattgtaatgtaaatatctgatatgcaggatgtctgatatgcaacccccaaaggggtcttgaaccacaggttgagaaccactgctctatagggtctctgttcacttctgactctccagcatccctctgtctcccccaagaaagaatcagtctcctatcctttggttagttctcaagtttgaacaggttctcaggcatcctctaaattcttccacttctccagttccttctgtttccacagagagccagcagcgctgtcttgtgttttgggtgattaggtggtagacttccattccaggctgcagctcctattctcctttgaaaaacaatttccttctggagatttccccacacaacacacctccttgcgccagcaggtctaaaaaattgttccattgttttgtatttgtctgacttcttaaagacctcatgatgctaaaagagaaactccttcagaccttcagggacttagcaaatctatatcatgctaagatgtgccctttcttccccgagtatagtaagtaggtccaccctgtctcccgtagtttaagccagaggatctgtgagcatcagaaagcatcaaatccacaactcttttgctggagccacatggaagagaggctttcttattccactgcagctttggtggccatcgatggccatcaggtcatctgtcaccaccaagaagaactgcctaaggttggaggaaagcagagctaccaagtgaagagaaaggaaacaaattcccaaccaagtcctctggctatatttggatattcagtcatgtgagcaaataataaaattagtatcagttgagcagaccttgtgtgctaggaaagaatatatgatttcaattaattctggactttaataaaacatgaactaggcatgacattatctccattttaaagaagaggaggaaactgaggcataagactgagcaactatatagctagtaacagtattgaaatgtgggaagcttggctctaaaagctgtcctggtgacaatcacacagtcctgccttctaaaacagagcagaagaaagaaaataaataaaatgatcattttctcacaagcatgttagcttactctttctcactgcatatttagaaagtttctgttaattgtatacatgatgattcatgaaaatatacttttgttcattggggaggcaggataatgtggttatttcatttgaattctgacatcaaactacctgaactcaacatccctattctttcatttctagctgtattattttgtttggcattgctatgacaaaacacctgagggtagaacttaaaaagaggaaaaatattttgacaccattccagtgcgcagtggatgaccactggggcctgtggcagggcagagcaccatggaggaagcatatgttgtgtctaccagtaatgtctatatagcagcaagacaaaaaagaaaaaaaagaagtctaactgaaagacataaaaagatggtctagaactggataagccactcagtagttccatcaagaaaaagctgggggttttgttagtttgtttttttttttcgaacttgaagcatcatggtcaagctttctgctgttctcggtacaccggccttgaggtcatcattcttataacctcatgactatgaggtggtgcctgggactctgagcaaccacgtcatcaaggaaggaagaccggaagtccgagactttctccgggagggtcttcactttgctcgaagtcctctggaagacctttgagagtgcttactgtcctaaagtgggtcagatgcccacctgcagctgctgaaaaggtgtgtgccctggaggagaagataaccatggttagctcagaacttttgattctttggagccgacagaacaaaaggaaggtggagagaacagtggtgtgggccatcaacaaagactgctgttttggttttgctgagaaacctcctctgttaaaagagatgaggcagaaagcaaagagcacattgctgcaagcttattatgctctctaaacatggtttctagggcttttattattgtgtgtgatctgtgggtctttaaaaccctatcaacaatccttcatgtgtttattattgtttcctcataaacagattcaaaaagtagaatttaattaggccaaaagctgtaaactcctgccaaatatgccttaatctaatcacgaggaaacagacaaatttaaattgaggaacattcattgcttatcttcttcttttttttttttaacaaaagtatcattttcatgagacacagaggatagatgaggaacgggtaccaattaaagataacagactaaatgaatgcacagggtgggatcatggagaggtcactgggctaggaaaacctggtaaaaagaaaattattaagacattcagtacaatctacatatgaaagaagtgaatctatgtatttgatggcgatcttgaaccaaagttatatttcctgaatagatgctcatggatagttatataaaagaatagtcttaggaaatactgaattagtcagggtatgaggagcattgtacagggtgcaatgactctatgcctactgtcaggtggtcttcagtgatactaataacattaaaataaaatgtaaaataattaaagttagagaataggtaaaaagtagtttattttttgtgtgttttcaaaataaaaggtttaagatgacgtattattggtttgtaaaatgaataagaaaattttaaaaagatttcttgttattaacataattttggcttttggtggtttgtgtcaatttgtaagcaatgttataaacaattttatcctggtatattaaagtggagtattttatcttttaactctttgctactttggtaggttaaaagcattttaataggctaaaaatacatttttatgtgtgtatttggtgaactgcatagttttcatgttcactgcatggttgtaattttcaaatcttcactaatttcctttttattaagtttttaagtagcatagaaagtggtgggttttattattgcattttatgcatataagctattatccattttttttcttattcatctgtctcatagttgtatctttattgagtctatttaacatatctattagggttttgtgttcttttttatttatgtttttaaattttaagttactagtccggaatgtctgtggtctctctaaatacactgagccatttgaaggacagaaatgaggtagattgacagaatcgttggaacttttattgaccccctgatgtctgtcagtgttaggccgaagtctttgtgaattgttgaagtgctttttcccatttcagaattagccaatttccttcctgtctgtgtccccacaactcaggcccttgcttgtcactgtagtaattcaagcattatgaaaaaaatgcccggatatttccagaagaaggaaaggcaagatatgtggtagtctctgccagactagcttgactcagttcctcctgatccttgctcacaatgtccaggcaggacgctggttatcatattatggagcaattaactgtgggacccctgtgactctcataatataacataatgctgagtaagagagggatgttggatgctgagtacaggagactgactgtggccccatcccatcatcactataagaaaaaagtgctcaagcatctttggagtccagaatagctggagaggtaattatgaacacacaggtccagaagaatacagtgtaggtctcctcatgtcttccaagtctcctgaatggttttgttagatatcaaagtttgagaactgttattctcaatgttgagctgtcaattgcattgaaaatatatcaaaatatctaactaaaacttgtctgtaacttgttaggccctgtttggtggatatcccccggaggtctactttttgttttccttttggaagggaaacagagtcggagtggatctgagggagagaggatcttgagggactaggaggagaggagggaggagaaactgtggtcaggatgtaatgtacgagagaagaataaaagaaaagaccttctatcaatgccaatgaaatggctcaatggagaaaagcgccttgagcacaagcctagagacctgagtctgaccctctgaatctacataaagatgaaaggagagaaccaactccacaaaatggtcctctgaactaactccacatgtgtgcgtaagaagtgactgaggtaatgccatcttgtcctgactccatttgtgtctgcttaggtgcttttccgccttaccccatgaacagtcatgtccaccttgacagcacattcagaacttcccatgaccttgaacatggccccaatgcataaccaaaatacctgctaaaatatatggccaaaacaaaaggggctaggttcctctgacctgtatttgacaatgaatgatgtcactgtgatttttttttttttttttttttttttttgcctttagaaaacactctaccccgtggttcagtgtcaagactttctgaggctctgcctactcttggtggctggcaataaaggactctaatttgacctctgtgtgtgtgtgtgtgtgtgtgtgtgtgtgtgtgtgtgtgtgtgtgtgtgttcatctgcaactttctcacctggactatagaatttgcatgctccttattctctcatgcacacaataacaatacatctttttaaaagtagaggctcaaacccgccatttaaagatgtcattgtctaaagtctttgcttaattttttttcctttaacagaatggagaggaataatttttagaagccttgccttgaattcttttctttaatggagaagaataatttctagaagtggcgggcaaaataggtgaggggtgaggcggcctaaaggggtataagaactcaaaacgaggaagtgtagatttaagaggatctttgaactggccagggcaggcaactgtgagctaaggacctcaaatgcttctttgtaggattcgatcgttgcttaaaaacaaacttaaaaaaataaaatacctgagggccttgggttgaccctaacatctaccgctgcacctatgacctgctggagcttgtacagggactggttctgtggaacaataactacaggatctccatgactcggggcaacagcaggatgtctgaggggagtttcagtgagaatccagtgatgatgctgtgccaaagaacttgaaccagaccaatggttcgttgcaatgaacattttgtggatgggaccgattgtgtaaaatggtataccgtgcggcacattgcagcacccagtgccactaggatgaatgaagaggtatttgcaggatgataagggagggaggtgggtttgtgtgttttgcttttaatttctttttttggggggggcatgctgcaggggtgagaagaggctatggagtgactgggaagtgagtgggattggggcacacgacgtgaaattcccaaagaatcaataaagaggtatgtttaaacaaaaaacaaagctgagtatgcaaatgctaatgcttacatgaaagtttccatgattcttcccttctgaggtaaaaaatcccttgttgaaaacatggcttcattgcccagcattggtggcacaggcctttaatcccagcactgggtaaatagaagcaaacagatctctgcgagttcaaggccagcctggcctacagagcaaactacttcaggacatagaaaaaccctgtctcaaaaaaaaaaaaaaaaggaaaaagaaagaaaagaaataaagacaaacaagaaagagaacagaatagctcctggagacaccaagcacagcttcgtctgtcttcccctagaggctgctggagcaggaatggagaggaagaatgcaaagttgttttctccactttgttccagttctttcttccactatagctggtggccagtttctgagttcttaaggatggggcgggggtctgaggaataacaaccctcttaaagaactgacatggttgagctttctgtgcctgctgggcattcaaagctggctttctcggggttttggaggttatttgaaagatgactctttgttctatcctacagcttatttcacctggtccatgtgtttctgtccctatggatagcgtgtagcctactttcagcctctccttccatccccagaagttggagtctttctccgagtagatctcttcttcgtgagctacatctgatctatcggaaaagctcattccgcctggcaagcctactgatctcacaaggcctatcctgaggccccaggctgcgtgaccgggaccaaattccggcagcatcttctggggctggcagctgcaggaaatggtcctttaaggctccccagaaaggagggagtggcagcttttcgccaataaatcctccataagcagaatgaggactctcctgagtaacagtcctcttcaagaatcctgagggacagaatcaactaacctgggctcttaggaactcacagaggttgaaccaacaaccagcgagcctgcacgggggtgacctaggtcctctgcatatatgtgacagttgtgtagcttggtcttcttgtgggactcctaacagtgggagaaaggggtgtctctgactcttatactggcttttgggaccctactccccatgctgagccaccttgcccagccttaacacaaggtgaggtgtttaatcttactataatttgatataccatgttttgttgatacccctgggaggtctgctgtttttatgactagaaatggaggagacgtggatggggggcggggcaaagggaaggtgggagaggaaggaggggaaactgctgtcaggatgtataagagaggggaaaggaaagaaggagagggagagggagggagggagggagggagacagagagagacctgattgagtacagttaatgttacttatatatacttggcagagggttaaccaccaaagaatggacaacctatcaggaggcagttgttcctaaagagaatgacccgctctccctcagcagccactgagctactgactgcccatgctggaatgttggctggcatgtcatgtttgggtaaccatattgttgggagttcatgggtgtaacgttcctgaaggaagacaatagatgacagaagatggaaagcccttccgtgcttatggattggtaaaatcaataatgtggaaatgatcacaccttaaaacaatgtacagattcatgacattgcagctacctgataatcaacaaagatgccaaaaatacacacaggaggaaagtgtgttttcgataaactgggctgggaaagactgggtatccacatgtacaaaaacgaaaccagacccttatctctccaactccaacttgatcaaatactccagtgtgaaacctgaatcctcccacaggattctctctctctctctctctctgtgtgtgtgtgtgtgtgtgtgtgtgtgtgtgtgtgtgtgtgtgtaattacagaaaaaaggacatggatttgagcggagtgtataaaggaggacatggaagtgaaggatgcactcatgtatgaaatgtgaaaactaaaccctgtgggattgatctgactcagaaataccttagtaaaaaatatgcacaagtgatccagttttggaaatgataccttaaaatttggttattctggtgcaacttacatttcagtacccctcccctaccgctgtttagctgtaggtgtcctatcaggaagccacatttagggaagtcactgtttgtgcattctgtgcctcatatccacaggctctggggagaggaacagattgctggaaaatgacggatagtccatgctatatttgatataaatgctgtgctatacaatccatattagttcttttatttatgagtaaaatgtgttcaatgtatcacatacatagaagcaagtctgaatataataaacatacttagtgtccaccaaggacaaggaagagaacactggcagctttttttttctccttttgggttttttgagacagggtttctctgtggctttggaggctgtcctggaactagctcttgtagaccaggctggtctcgaactcacagagatccaagggcctctgcctcccaagggctgggattaaagtcatgtgccaccacagcccagctgaacactggcagctttaaggggccacatcatagctcttctcggatgtttccccagaatgaacatcctgaccatcaacaccacaagccactctttccttcgaagctgaagtgaaacagtttgtgtccgtcatgcttcagaagtttacttgtaatgtcgcgtctatgaggagaccgtctgttctcacttctgggtagccatcttgtgaataccatcagacaactaatatttaatcagtgactgttcttctccaaggtagcttaagggctacctgcagcaccccagatcttccctaattccaaccagcatccacaggaagattctcaagactctctaaagacatacattgcttgtcagaacaaaacagtcaaactttttatacacaaaacaatactatgcatgtacaaaggtaggctgttttgaagagctatttttcctcattctttatattttatcccattgatctttggtttaaatttggctggcttagagctgacatgagctggagaaaatcatgtcactgagaaacattctgcaaaaattctgattagtgttggatggctttccatttccttgggagttatgataagaacttttatcatttagatcccaggaaattccaaccaacctatctacagtaacaaccggaaatctgaaattcatttctgaatatttcttgcattgtacttatgtattttggtgtgtttgttgcacttataactatgtaatggctttttttctgttaacatgaaatatttcaaagcatgatagtttgccatctgagaaaaagagccttacaggttttattcagatgaaaatgctgcacagtgaaaatttgttagcagttacttcttggatagtgtccacagaataatttaaaatgttcgaactggatatgcctcacacctataatcccaacagccaataggtacaggtcagactggctatgatgtgcagtcaaagcccatctgagttatatggctagaccctgtctctcaaaggctaaagatacaactcagaagtctagcaaggctctgggtttgatcccctgtattaaaaagaagtatggtaaaatattatcaaggttctgaataataaatgaaaggcatcaaggacttttataacatcctactcaacaaatgcttaaaatcgtaacattaattcagtcagaggtttatgtaaagcctagtttgtgcatttattcatactaggcaagaggcacctggaatcacgtgaaaactaagaatatttacaccatgtttagaagtcacaccaagaaataattttgtattattttttacatttatttatttgactgagcaagtgtgcatgtagatgcccatgccacaaggtacataggaatgtcagaggacaatctgccagagtcgggtctttctcttccactgagtgccatctgtacaatcaaactgaggcatggtggcaagtgcctttacccactcaaccatcccagctatcctcaacaggtaatttttttaaaggtgtgaaacagctgtgtattagacacatcaacaggtaatttttacaaagaatgattagtaattattgtcttactagataaagaaatttccttcctttctctctccctccctccctcactccccccttcccttccttcctctattcccctcccagagatggggtctcaggtatctaggctggccttaaactcactatgtagctgggaacattgagcccatattcctcttgcctccacctctcaagtgctggaattacaggtgttcacctagtttgcacaggtgaacctggggattcattcacccagggcctcaaacacattacacagacactctagtaactgtgctacattctcaacccagttaaagagggttcttcatgtgccttatgagcacaagcaccaaattgatgcctgagagatcatagaatctctgcccaaaatgtgaggtaggccagggttttgcaaaaaccgaaggctgttcactgataaagaacatacagtgtagggagctgtaaaacagctgtccaagcccagactggagaaggcaaaaggaacaattaaataagctggggcctggaaatgaacattcaatagccctggcaagaattgatctttaagataacaccctgaatatgtataatcttagcatctgagaagctgaggcaggaggatctccatgacttcaaggacagcctgagctacctgacgagttccaagccattgtgcttgtagagtgaaactgttttgagatgcaaaagaacaaaccagcatggtgggataaggtgcttgggaatcagccagtttggatttatattaaacttctatcttccctactgaaaggtggtaaaatggcacaaacctttcatcgtttcaaagtctcaggtttcctcatcctaaactaaagaaaaagatggattttctcaggttgaagggtagatcaaataggctaatacatatagcattgcctagccatgtgtccaccacacactgagtcggttcctcagtcaaagcagcagctggactgttagtcataaccttggaactacacggtccatgactaaccatgactaaggtcagaggttaggattgattgattgattgattgatttatttatttattttttcgagacagagtttctctgtattgccttggagattgtcctggaacttgctgccttcaaactcagagatctgcctgcctctgcctcctgagtgctgggattaaaggtgtgcgccaccaacgcccagctagggtaggatatcttacaggatccctttggttgttgttatagctactactagtttctctttctgtctacaaatgaggtgtaaaagtgagaaagtatgagtcaaaggtataacttctgttccatagacacagttgttgaccagttatgagtggaaatgtcctgtggcaaaactgtaaagcaggcctgttcgttcaactttaccctcccaagccagctttttgtttccttgcacaaatgcaaattggacctctaagcagacaacaaccagttaaatgcatgtgtgtgctctggttctttgctgagagatagtaaaaccaacagtaaaggagattttccaaaggcaaaacccaccaagaggatgacttaggaagacaaaaagaatgtgatttggaatcaagaggccaatagataaagaggtaacttattttgttgacctgataaaaatgaccgatagacatgtcttggtgaaaaatgggaattacttagtatatgaattttccttgggaggttttgacaatgtaacactaacatgggtatctatctatatgagtcagctaacactgggcatgggggtggtatgaatcagcacaaaatgactgacaccagatgtctggggactcccaaaataaacagtgatgtgatctgttacataactacttttggcagagtgccacttttgtgtgattctgtataaatatggccttggggtcagaggtgttagctctgtgccctcaccagcctgcctatgtacccactgtgatgcgttctctttactctctcactgcctcctaactcagcgatcttcctcctttcaaggcatcctaccacggacctcagaggtgtcaatgaacttccgtctacctgagatggagcaccaatgaccgactgagaaatgattccaccctagtctaccttagtaaactagtgaatttgttgaggttccaggactgtgtgtgagggtcattcactggagcagtaactcaaaggcagctacatcctgtcatgaatgatggttcacaaaaccgtctctggagttcggtacacaccttataatcaaccaggagttctcctgaagttctccctagcaattggtactacttatgtaacagggatggagtggggtgtggagtgtgtttcttttaagttttagcagcttccggagacttccaaagtttgtttactttatgagccttatacatttatacagttgttttacgcctgcggtttcttttctttcttttttttttttttttttggtttttcgagacagggtttccctgcggctgtcctggaactagctcttgtagaccaggctggtcttgaactcacagagatccacctgcgtctgcctcccgagtgctgggattaaaggcgtgtgccaccaataccccgctatgcctgcatcttaaaagagactctcttctgcctcccagagggaggctgtttcaatttggttgcatcagagacctcctttcatgctttggcaatggggagaaagataaggtgaagaacaggtgtaaataacaagcctctttagaaagtggttcttcagttccacacaactccagaactaacctcactgaggctgagtaagatatatagcctccttctggagtaatacttggcaaatatgggcatggggttcagttctataaatggggagaaccctgggaacatatgttaacacagtaaaatcccaagtatttcaccatgatcctggagttcagaaaaatccttctgtgatatctgaccacctgcaaaagaaagacatgaaaacacagctgccaacagtgctgggggatgggaagggggatgggagtgggggatggggtgggaggtaagtttggggagagctttgatttcttgtggagactcttggcttgcaagtgtctctttgctcactgtgtcctcatagtcttccattgaccaatgctttgtgtcttaatcccttttcttatcaggccactatactgaattaatgcctgcctatatgacctcctgttacccccccccattactttttaatggcccatctccatggatagtcacattctgaggtacttatgaacttggaggtaccccatctagctggtgaagaacaggagcaaagcaaaaatcctgtaagagtctggggtaggtttggaaatagtcaaaatgcttggttccagacgggatcaaagatcttgtctttgtgctaggtagttttttgttgacttggcatacagggtagagggaacctcagttgagaaaatgccttcatcagattgcctgtaggtaaggctgtggggacattttcttgattaatgattgatgtgggagagcccagttcattgtgggcagttttacctctgggtaagtggtcctgggttgtataagaaagcaatctggacaagccagggaaccaggccagtaagcaccattcctctattccctgtacttcagttcctaccttaaattcctacccggatttccctcagtgatggagtatgacctgagttataaaaggaaataaactcctgcccatttttggggagggggagtcatggtctttatcacagcaataaaaaacaaattaggatgatttctgacttcaaaaatacaagaaaaatgctggcatgccgtgatgagcaatagtaaaaaccaattaagagaatgatgaaaaaagtcatgtggataagacagaaagcagtggggttggagagatggctcaggggtaaagagcactgactgttcttccccaggaccaggattcaattcccagcacccacttagcagctcacaactgtttataacttcagttccagaggacctgacacccatagcaaagaacaccaatgcacgtaaaataaaaatagataaaaattaaaaaaaaataagacagaaagcagattagtggttacccagggcctgaagtggagagcagattgatggcaaacagatgcaaaagaaccttaaaatttttattatttgtgtgtgtgtgtgtgtgtgtgtgtgtgtgtgtgtgtgtgtgtgtgtggtgggggtggccatgtgtcacaaagtacatgtggagtcagaggataacttccttccatctttatgtagcttctggggattgaattcatgtcgtaaggcttgcacagccagctcctttacctactgagccatattgcaagtaccaaagaaatatttggtataatgaaagtgttctaaaactagattgtggtgatttttgcacaggtgtataaatgcatttgaaattcattgagttggacagttataatgcatattatgcaaattttgtattaacaaaactgtattttatttttatttgttgttgttgttttttggaggctgtcctggaactccctctgtaaagaccaggctggcctcgaactcacagaggcctgcctgcctctgctgggattaaaggtgtgtgccacccacgcccagcacaaaactgtgttttaaaaaacaagaatggattataaattagcttgttaaaataggattaaaacaaagcaacagcaacaaaagaggcattagggtattgtggtacacaccagtaattcccagcactagaaatagaggcaagagaactgagagaatgaaaccatcccaggctgcatagtgagtgcaaggtcaccttgggctacattagggaggccctgtcacaatcagacagacaaaccaaccaacaaataaaacaaaaaccccaaggaggcttgggatatatctcagtggtagagcacttgcctagggtgcataagatcctgagttcaatagccagtcctgaaaaggaagtgggtacccaagggaggcaagatatttgcatagttttaaagtatctctccactaggtactcattaaccagagtagggaaacaacacctttataacagagaaagctggcaggcactttaaccatgggatctatgttaggggtagttagggatatggacatagagcgctttctcaggtgacgtatggatagttaacattcatttgtaagcatcctctccaggaatgtgtaatccaaattgaagcacgagaaaagtagtataaaccaaagtggagactctattacagaataactcaccaatattctttccaagtcgtgaaaattaaagttatgaaaggcagattgagcaagatacttggttaaaaagaaataaaacattttgtttatcatctgtatatagtagggctactgattttttttttgagttaattttgtatcctgccactttgctgaagatgtttatcagctgtaggagttccctggtagagtttttgggtcacttatatagaccatcatatcatctgcaaatagtgaaagtttgacttcttcctttcctttgtatccccttgatctccttttgttgtcttattgctctagctaggacttcaagtacaatattgaagatatatggaaagagtgcacagccttgtcttgttcctgattttagagggatactttgagtttctctccatatttctctccattctctccagtttgatgttggctgttggtttgctatatattgcttttattaaatttagatatgttcctgttattcctgttctctccaagatctttatcatgaagggatgctggattttgtcaaaggcttttttagcatctagtgagatgatcctgtggtttttctttttcggtttctttatatggtggattacattgatggattttcatatgttgaaccatccttgcatccctgggatgaagcctacttgatcatggtggatgatttttctgatgtgttcctggattcgattcaccaatattttgttgagtatatttgcatcgatgttcatgagggatattggtctgtatccacaaacagcataaaatatcttggagtaacgctaaccaaaaaagtgaaagacctgttaagcaagaactttgagtttttaaagaaagaaattaaagaagataccagaaaatggaaagatcgcccatgctcttggataggtagaatcaacatagtaaaaatggcaatcttgccaaaagcaatctatagattcaatgcaatccccatcaaaatcccaacacgttcttcacagaccttgaaagaataacactcaactttatatggaaaaacaaaaaacccaggatagccaaaacaaccctgtacaataaaggaacttctggaggcatcaccatccctgactttaagctctattatagagccatagatctgaaaacctcttggtattggcataaaaatagacagatagaccaatggaatccaattgaaaatcctgatattaacctacacacctatgaacacctgattttcgacaaagatgctaaatctttacaatggaaaaaagatagcaacttcaacaaatggtgctggcacaactggattctgatatgcagagcactgcagatagatccatatctgtcaccatgcacaaaacttaagtccaaatggatcagagatctcaacataaatccagctacactgaaccttctagaagagaaagtggaagatacccttgaatgtattggtacaggagactgcttcctgaacataacaccagtagcacagacattgagatatacaattaacaaatgggacctcctgaaactgagaagcttctgtaaggcaaaggatacagtcagtaagacaaaatgacagcccacagaatgggaaaagatctttaccaaccccacatctgacagagggctgatttccaaaatatacaatgaactcaagaagctagccaccaaaacaccaatcaatgaaattaaaaagtggggcacagaactaaatagagaattctcaacagaagaatctaaagtggctgaaagacatttaagaaagtactcaaaatccttagccatcagagaaatgcaactcaaaacaactctgagatatcatcttacaccagccagaatggctaaaatcaaaaacaccaatgacaatctatgctggagaggatgtggagaaaaagaaacacttctccattgctggtgggagtgcaaacttgtaagaccactctggaaatcagtatggcggttgctcaggaaaatgggaatcagtctacctcaagatccagcaattcttctcttggacatatacccaaataatgcacttccatacaacaaggacgtatgttcaaccatgttcatagcagcattgtttgtaatagccagaacctggaaacaacctagatgcccttcaactgaagaatggatagagaaaatgtggtatatttacacaatggagtactactcagcagaaaaaagcagcggaatcttgaaattcataggcaaatgaatgcaactagaagaaaccatcctgagtgaggtaactcagtcacaaaaaacaaacacggtatgtactcactcatatatgaattttagacatagaacaaaggattaccagcctacaatcctcttcaccaaagtaactaggaaacaagaaggactctaaaagaaaaatgcatggtccctggagaatgggaagggccaggatctcctaagctaattgggagcatgagggtaggggagagggagctcgcagaatgagaggaagagaagagaatgggagaggaggaaatggaggagcagaaaggttgagttgggggaagaatagaggagagcaggatgagagatatcataacagagggagccgttataggtccaaggagagatctggcactagggagatttccagagaactgcaaggatgacaccaactgacaatctaggcaatggtggagaggctacactaaatgcctttcccctataatgagactgatggcaactttatatgccatcctagagccctcatccagtggctgatggaagcagaggcagacacccacagccatacactgaaatgaactctggaacccagttgcagagagggagaaatcaagagagtcaggaccaggctgatgaatcccacagaaacagctgacctgaacaagcaggaacacatggaccctaaactgctgtctgggaggccagcacaggactgatccagacccctgaacgtggatgacaatgaggaggcctcggcactctatggggcctctggtaggggatcagtatttttctctggtgtaagaagggactttgagagcccatcccacatgaagagatgctctctcggcctagacacataggggagggcctaggcccagcccaggatgatgatgtggaatttggggagcccctgtggagggcctaccctctatgggaagtggaggggggaggggaggggactggtggggtgttggaggtgagagagggatgagggattgacatgtgaaattatatttttgtaaaaattaaatttaaaaaaaaagaaataaaacaacagcatgcaacatggcttcctgggttggttcctggtccagaattgacagaaataagactttattttatcttatttatttattgtttttctttcttttcttttttttttgttttttgttttttttttttttttaagatagggtctcactgtatagccttggctagcctggaaccctctatgtaggccaggctggtatcaaactcgaacttgtacttgaaccacagtacttggaattcaggaatgtaatactgaacccagacacaaataggacttttctaagacaactttaaataaggtctacaaagtaattaatggcaacttaccaaagttaatcttctgtctttggtaacagcacagcaaatgaaagatattaatattgtgggcagcaagatggaaggcatgtgagaatctctctaaaacaaatgtaacatttgtaaactgaaagtttcaaagtgcaaagtcaaaatatagaaggaagtttcattttctgctaggcaaatgacagtggtttgacagtgagaaataaatggtgaggtaaagaccaaagttctacccattcctctgaaagcaacaacttagaaaataccaagtgatgaattcatttattgctatattaaccattttctctttccctttcttcttccaaatggaaccactaagtgtactatgttgcatttttctttttatgcataaaaatgtattttacttaatctaatgtttgaaggaatcagtttataattatataaaatattttataacaatttgttctaaatagtaatttatttgttggtattattattgatacttcagcgtttttataacactcaaaagatagattttcctccacttttttgcaacaattttcatacattttagtatatatatatatatatatatattgtgtaatttttgtgtattattattacatgactactggcaaatgcatgtatccagcgaacaatacaatcaagaggtagacaattttgtcagtccctaaatttttcagtgtcctccctcgctttagcatgtacttatataaaataatgggctcatcttgatgttttcatacatggtatactgtattttgatcatatgcacacacacacacaccatttgcacccttatgctccatccttccttcttagtctcccttactcccttgtcccttgtactttcatgtttgtttgtttttttctttctccacatatatgacacttgtcttctagagtctggcttattttgcttagcatgacaatctccagttccatcctttgtcctgccaatgacaatttgtccttctaatggctcgataagactccattgtctataggtgctgcattttagctactggtgggcacctgagttgattccattcctggcctcctgctgcatctctcattctgaagagccttttaaattgatgcaatcccacccatccaaccttgctattatttcctgggctaacagtctatcttttaaaaatgatgttgtgttttaagcctaacattttgattcagtttttgcttaatgttaaaagagaaattataattgatctctaaacttgcatcttaaaaagcaaacactggaaagacagaatcattcacccaagaacgtttgaggaaagcataatgttagtgtaaatccctctcagagaagatattggatgagtgtgtacactgtggaggcctggacagaccataaacaaagagcactagccagatggggccaaggtccaggtgggtgctctaactctgctgatagatttattgcatgcatactctgtttctgttatgatatattaaatagttttctcaacaatgtttactgagaaggaacaagccaactgctcgccttggagcttttgttcagtgtcctggtaaggtagcctttcactttaaatcatggaatgatcataaaactacaaaatgtatattgaggaaattggacttggttagtttatagggtatgtatggatgttataggaaattaagtttgtatttaaggtgtagatagaagttccacatcttacagtgtgggtttgtttttaaacagaatgctttggggctgggttgaagctcatgatagtgtgtattaacaactgtgaagcaccgagttcagcccttgtgacccaaacacaaccacaattcttcatccaagatcctttgttccattttgttcccttagaggctgctaaaaataaagttggtcctagcaacttttataataaattaactttactctcatgtaagccaaacttagctatttctctataattgagtagtttcatatacttctagcattttgtccttaataccatgattagaatgttgtaaatgtctgtaggacaaatttttatcatagagtttctagctcaagggtatatgcaattaatattttaagagatagttaattttttctttcacaacagagttcttgatgtatatttatttaaacaatcctatatgcttttgtaagcagtagtacaataaaaatgtaggtttttcttttttaaaatggtgacagccaggtgttggtggcgcacgcctttaatcccagcactcgggaggcagaggcaggcggatctctgtgagttcaaggccagcctggtctccagagcgagtgccaggataggctccaaagctacacagagaaaccctttcttgaaaaaccaaaaaaataaaaataaaaataaaaataaataaaaatggtgacattttacatattatctgaccaacctctctgaggtagccatgatattacaaagatgcacaccctcccaaatatactgtgtctgccaggtagagtgtataattgaattatcattaaactttacttaatgagaagttctgataattaacataagctagagtagaaacaaagtttattgttagatatataaaatatagcttcttgggatacttccttatactgtttagctttttttttccaagacagggtttctctgtgttgtcctggctgtcctggaacttactctgtagaccaggctgacctcaaactcacagagatccacctacctctgcttcccaagggctggaattaaaggtgtgcacgaccacccccagctctgtttaacattttgagatgtctcacagtataaagtctgggctggccataaacttgtgatcctcctgcctcagaccccagtatggtggggtttcaggtttgtaccaccctacctggtctctttcttttcctaagacagtagtgattttttaccttggatgcatgttttagagtggtacctaatcaatcttcaaaggcatgataaaattatatgtctcgattatggaatgaagtggttaaaaataaatgcatatataaatcaataataaaacacaaatgagatgggccgcacttttaaaatataatgctttcaataacgagcattccatacaatgtatttttgtcgtattcacccagttcctacctctaacttcttccaaatccaccctcacctccttacctccccaacttattatcttcttttcattatttttttttaaattaacccaatgagtccaatttgtgttgcccacatgctcctggttgtgaggctatccactggggcatggttgacctacccagccacaccccctcctccggaagtctgtctatgaactgtctatagctcctcggttaggggcaggagttcatgagtgccttcctcctccatgctgcagtgttcactgacttcaccttctgctgcaggtcttgtgctggcaaacatggcctttatgagttcatttgtgcagtagtcccatttgtggatgagcactccaatgacaagtattctttgcactttggtcagttgtgagtttgggttttttttcactgatcacagtccactgcacaaacaatttctccaatgaagtctgacagctgcattgatctgtgagtacagaggcatgaattcagagtgtagtttgttactatgtccctttagcaagaaagtagtgggttcttggtcagatttatagtaccaagcatgtgtttccttctgtggcgtcggccttaaatctagtcagaaaattgttggttacccatgtaatatttctgccattacagcgccatggacttatatacgcctcattcttatgagaagaaagcatcaccagtgtatatcaagttctagaacaaaatctatatgtatccttatttatgttaaaaacaaaaaatacatatgcatacaaatggatatcaaaatatttaatacatagatgtgaagctataggtcacaaatttaaaactgggttagcatccattaagttgctcacactgattgtacagtattattgacaaaagagaggcagacaatggtgaaaaagactgccttttaaacttctgtttaaacatcacatccaggggggggtatacatgcaattctaaagatggctaactaaataaaaacctcgtattggttatgattagtttcaaacgcataaacagaaatccaaacaacacgcaagttcaattcccctcttttgtggtttagccaagtcttcagtaggcactgaccacagtggggactgtttctgagccactgctccacttcctcctgtgtgtagctcttatcttcagtaaccaggatgtgctgtaaccatcactctcccacatcctggacaacaggacaaaaggagaaatgaagacagatgataggttccaggtatctgccacttgcatatgtcccaaaaccagagaattctcacttggccacatatagatgcagaggagactgggatgcgtggccttcacttctgggagacatccacaaagtttaaccaacagagttcagaagcaaggaagagagaatgcagcatctgtctttctgggtctggattccctcacccagtattatacaatataattggattgctttctgcttccatctatttaaccctcaggttttattcttctttacagattaatagaatcctactgtgtatatgtaccacattttcattatctgccgatcaggtgatggatgtatagactgcttccatttcttagctattgtgaatagagcagcaattagcatggccaacaaagtatctctatagttggatgtagagtccttttatggtttctcttatttgtagctctttacagtatataacctggagcaattacagaatccaggaaagtaaaatgagaccatggggtggggtagggtctctagagaatgggttagtagggaaaaaataagagaagtttaactggtgaggggaggaggagggtaatgcatagggagagaaaggaagaggagataagtgacactaaggatgtttgaaaaagccacaggaaaacatgttattttataagcttacttaaagatatatatggatatatatctataacatgtgtgtatgatatttatatttacatatctcatttatatggaattacaccacgtgggggtgataatgctccccataaaagctacagagcaacaaaaacccaaatgtcacacaaggaaaatctcccttcatgttgctgattagggggatccaaaggactccaaaacaatataggctattcccattgtctttggttacctctcagaacttgaaggtaggaccctattgctgaagataccacccacttctgacacaggacttggaggaatcaagctggtactaacctggaaacttcctccctgaaggcttgctctcataggatcagaaggtactatgcacccgggaatcacaacaatgattggcccagccaaaaatcaccaataatgcacttttatcttgaggacaactaacaggtgtctggttagacttaaagctagctcaataggagggaacttgtactggttagttctgtgtcactttgacacagtccaaggtcatttggaaacaaggaacttctgttgagaaaatgccttgctatcagattggcctacaggcaaatctgtggagccatttcttaattgatgactgatgactcagcccactggggatgttgccacccttgagtcctaggtggtataaaaaagcaggctgagagccgggctttggtggtgtatgcctttaatcccagcactagggatacagaggtaggtggatctctgtgagttcgaggccagcctggtctacagagcgagtgccaggataggctccaaagctatacagagaaaccctgtctggggggggggaggagcaggctgaggcagccatgaagagtaatacagcaaacagcatccctccattgtctctgcttcaattcctgctcctaggttattgccttaaattcctgacccaactttccttcaccataggctataagctgtaaactgaaataaaccctttcctccccaagttgcttttggtcatggtgttaatcacaacaatagaaggcaaacttagacagaactcatgcctggtattgtaaacctagccaagaacttttagctagagatgtcatagaccctagcagaggacatactaatgccattttcctaagtcaatctagctgccaactgcactgtataacaaactatatgcctgtacccatagagaagtgtagctctcagccatcaccatagacacttctttgtgcagcagatggtggctaccacagaaatccacaactggtaaaaatacagaaaataagtgatcatagagtgtgtagccccaaatgatacacccctctataaggctcaggggacatcatggaaaagggggtggaaagaccaggacaccaggttgtctactttgagaaggtgtcttctagacttgacaaagatgctgtacttagggaatctcaacatatctccctgcacaagatttccacaatgaccacaccagtagacatggatactggagggtttggagagggaaagggagggcttgaaatgatgcaaatgcagtacccatacatgaaagtctcaaaagttattgttttaagaaggggaggacaagccaggtggtggtggtgcacgcctttaatcccagcacaggggagacagaggcaggcagatctttgtgagttcgaggccagcctgcttttcaaagagagttccaggacagtctccaaaaacctacagagaaaccctgtctccaaaaaccaaaagaagaaaaaaagaagaaggggaggacaagtaatagagcccttcattcagaaactttccagttagtttagacattctttgtaccactaaaacaatacagttactatgtaggagaataagaatgctgaaagttgctaatttgaagaaagttccctaaagaaagatgatgtaatgaggtggagagaaggaagtgactatgaatttggagccagaccacactgagactcaagggtggggagaagatgttaaattaaataaaaggcgtaaactaatctaagggaaaattcactcctctctctccagtaaaattttggtgactgctgtgttctgaatgcaccccctaaatttgtatgttgaagttcaatcaccagtgtgatagtattaagaggtgaggcttttagggatgagtaagagacaaggtttgtcctcatgggggagattagtgatctcataaaacaaaagatggaagggagtttttgatttgattgttttccagctgaggacagcatctatctcctctggagggcccagaaaccaggccttccttacacaacaagcctgcctatgctttgttcttgggacttcgcagtctttagaactgcgtgaagtaaatgtctcctaaaagttcccctgtcctatgttcttttctaacatcctggaggaactaagacagggaggagcttacgcagaggaagttggaggaatccgaaaacctgggtctccaagttaggtagcacgcacagtgtttgttaagtgagggtcacactctttaagggaaattgggacaggagcatgaggaaagaagatggagaggtttcactgatttctgtgtttgtcattacattcaagaaacagtgagcaagcacctgcatatacctattgcacggacagacttcttagcctagatacacacggaggggcctaggccctgccccaaatgacttgacagattttgatattccctcatggaaggcctcgccctccccggggagtggatgggggttatgggaggatggaagggagagggaactgggattgatatgtaaaataagattgtttctaatttaaataaaatttattaaataaaaaaagcaaattttaaagccacaaatgttagcttcaaatttctactgatacaaagatagcttaaactttctccctaagcaattacaacataaattatttcacttttttttgtggtattgctcaaggtagttccttgcttgatactctatatctcagagacaacagtgcaccgctccagatagtctgcctgcaggctttcactagggttttgttttgcttttaaatttgtaagaagctagctttttaagagactggcatgtaagttaagccttactaatagcattattcaaccactgcaagatagcagagttcaaaagtattaccaaaagaattgcctttgaaagtcatacctgttgtgataaagtgagaggggaaacttggtggattccactgcaggcgtgggggtgggggacaggaaggggagggggcacacaaacaagctaggtagacagagcttagtgagaggctttattagaaagtgagcagggaggaaacagaaaagagataaagagacacagagacacagagaggacaaaagagaagagggagacatgaaaatcctgtctgccccaggagaacagcaggaagaggggggacataagtgggcagggatctttctttttttgtttttggttttttgtttgtttgttttgttttttgagacagggtttctctatggctttggagcctatcctggaactagctcttgtagaccagactggtctcaaactcttagagatctgcctgcctctgcctcccgagtgctgagattaaaggcatgtgccaccacctcctgaaggagatctttcttttaaaggggtcctttgcaactgcgagcataccaagcaaccatggaaccctgagctgaccagggtactgcctgagtgcattctgccaggtgacaggggcaagccagcataatgcctgaatccttacaatatctcctaaaacatgaaaatatagatattccacctgccagccaattttaatattctagtgaggagggattatttctttagagtggttgtgtgttttagcacaagattatcaagtaccgaataccaagaatcaactttaactagtcacaagaatagctgccattcctcttaggcctttcagatatgtcctcaaaaatgtatcaaactggtaaacattagatatttataaaaatattttgtttattgacttgctaagaagaagtgtgattgtgaaactctgtttccttttctttaagcccagaagctattgctggccatgagggtgcctgtgcaggaagttgcaaaacagagaaaaaagaaaggcaagttggcattatttttcctctggattagatattgtcatggtttagatcttctcgtggtgacagatataattattcaaagaagaaaaatgaagcaatggggagtgacagggaaatatgctcagggactttgggacagcagggtgattgtcagaaagctgagctgctatagtctagactccctgggagcttgtctgttttgctcctcactaacagggatcctaatgtgaaaagatcacatagtatccaacttaggtctctccctagctgggcaagaataacctaataatttacccttctgagattcagcccctcttctggaggttactaagtttagagtaattgtggtgcacaaaactgctgaatgcggagagatttataactcaaattcaagatagtgagttcttttcactaaactttagcacagtgcaagaaaatattacattacattatatcaggacttgataaaccatagcctgctgcctcccttgtttttgtatggactacaagttaagaatggcttgcatatttttaaataaactgaaatttaaaatttagaggttctagaaatgtctcctttattacacaaacacattgccttcatgtttgcctttgggtctgttaagtctaaagtgtttattacctgtttgttttattttgttgtttttaaagtttgccgatccttggcttggcagaacatggaagtgtttctggtaaggcagatctggagtgagtcacaaactgtcactgtttgcatgaccttgagcaagatatttcatttcctaagtttagcttcccttctatgaagtgggcacataagcagtatttatcatagagttatacatgtttaatatgcttaatataatattcattagatagcaaggactccacacattgtaattattgctcttattatcttaccataaatttattgagatgaaacaaaaaataacaaagctaagtgtggggagaattttaagataaatgacaaactgctacagtctaccatattatatgtgggagttgtttttacattcttattaaaagacattttgaattaaacaacaataacaaaggctcacctagaaaaatggtaactcttccgctgtgctagaaatgatagacctagctacgtaggagaaatgaggctgtgagtcttagatgtaatagattaagacctccttctttagaaatatgcttgataaattctgcttggttaccagagtgagaaaatagattcatagagtcaatggataattaatttattggagaagaatatgcaaaaagactaaaagaacaattttaccaaactgtaagctttatgtttgtacctgaggtcagaactttaagctgataaagtcaccaattctctgtgaaaaacaaaacaaaaaacttcctaacatttgagcacatgatggcccttaactaaaacaaacaaaaaacagttaagagataaaattgaccaatgtgcacaatgcaatgtttttcagtgaattcagagttgttttaacataatgataatcaaatttggaacattcttattatcataaaaatacatggtacttcccaggcaatggtggcacaagcctttaatcccaacacttgggaggcagaggatcccagtgagttccaagccaccctggtctacaaagtgagttccagcacagctagggctgttactcagagaaacgctgtctggaaaaacaaaacaaaacaaaacaaaaacaaaccaacagaacaaaaaaaaaatacatggtactctattacgattaataactgatacatagcctgtgatggtcaggatatatatttattatttattaggtagccaactgtttggctagcagaacaagccaaaacagcagggaaaagagagctaccatgtgcgttccctattccttcaaacctttctcatgtcaccctgacatcaccttgaccacaccctgataggcgtggtcaggcacacctgtagccggcccttaggtggtgtggttatggtgtctccctacagtactctttagcagtgactcttaaacccccagtccttagcaaccactaacttgtctctctagacttgcctattgtggacatactacacaaatgaatttagacaatgtgtagtctttgtgaatggatttatttttagcatgtttttgcaatttgttcacttggtagcaggtcaccagtactttgtacctgtttgttgccaattcattttccctgtctggacataccaccttgtttgtctgtcagatgatgagtgtttggggtacatcgaacacccaacgtatgtaatttttgtaccaggctctttcttttgggccaccatccaggtcccaaatcatgacacagagacttactattagttagttttgaaggcttaggcactttttttttttttaaggctagccttggggctttttaccttctcttactttcttgctgtctctgtctgctggctgaaggctgcctggcttctggccctgggtatcaccctcattcttctctcttctccctcttgtccttccttctttctcctctctcaagcctagatttctcctcctatttatttatttatgcctgtcagccccgcctaccctttctcctgcctatcttttggctgttcaactttttattagaatgatcaggtgccttaggcagaccaggtgaaacaattaaataatttttaaaaaatgcagaataaacaaaagtaacttatctttgcctagttaaaataagattgtacaacaaactcttttttaactctgagtaaagcctcattttgacacaacattgcttgctagccatctggcctgaactatcctcctaaggctgagaattaaatatggccaaaacacacaagaagatgctcagtccttctcataaaccaatgacaggcaactggagatcacattggggtattagttttatgtaattggtaagggattaatgtccgataatactggcactggatcaatatgatctcttagttgttgagagcatgtattaatgtttcaaaatgaaacaaaacagcaacacctgaaaacaattgacaggaaattcagcagtgaagctggaaatacagcaacccccaagagattatatacattgtatggtactctttttatgaaattgaaaaacaaaattaaacattatttatgtgtatcaggacaaaacaaatatgtaaaggaatgtgcagcaatttcaggcaaattcatgattttagttagttggaatgcaagagatgcaatttaacaattttgggctaggggtgctgccaaggagtccactataaacaactgcagaggaatgttctccatcttaacaagaatactatgaaccaacagataaaataatgaaccgagtttaacgggtatctaagtaaatagagaaaatgaaaaataaataaaacaaatataaattattactttgtaaaagatcagacaaactataataggtaattatcattgtaaaaagtttagctagttatccttccggtagaaaggtttcaattcttagcatgacttccataatcatttttcattgtgaatttaaaaaaattggacttctttcttttcttttctttttttttttttttttttttgagacagggtttctctgtattgttttggagcctgtcctagaactggctctgtagaccaggctggcctcgaactcacagagatccaccgcctgcctctgcctcccgagtgctgagattaaaggcgtgcgccaccaccgcccgacaaaaattcatttattgagagtaaaaagatgtcaacttgagaaagcctgtcttgtgggaactgctttggagaagccactccaagtcctaacctgtctcccctcagccctagcaacagacagtagcgagcttagaggagagagagagctcctagcgtcctaacaacacagtgcagccaggctcactatcggaggacacgcccctagagcatgcctcacatccgagggtgtgtcctatcctatgaggggcgtgtccatgcgtgtatgggcgtgtccacctctgcacaggggcgtggcttcccgggaaggcgtttctaactctcgtaggggcgtagctggggggcgggctggttcctgaaagtcaggctgagagtcgcgttgtggtgatgtcatcagagcagcgctgactgaatccattccaagtagggcgactgtggcagctctttcgctgagggggcggtggactgccggtggcatgttaccggctatgaatactgtggaggcggaagaggagtacgcggaggattgtcctgaactggtccccattgagaccaacaaacaagaggaggaaaatcttgacttcatcgttaagattccagtcacaattatcaccgggtatttaggtaattaacggtcgctcagaaaaacgccgtgaactgtgctctcggaggggggtctggcgtgtcgcttcaggcacccgggctccatggccgaggacgaatgtcttcgagtaggctttggggtctctttctcctcgctttttcaaaggtggttctgaaactcagacgcaccttattgccctatggccccttgaggagctgccttcttacctttgtgaagctcatccacctcagtttagatggaaaataataaaagtcacctgagtttgttttctcatctgagaataaagcccaacaaaaccaacgatctattgttattaaaagctgatcaagaaaataataataataataataataataataataaagatgccctgtatgaaaaatgccccagaccttgcttagtttaggagattacacttcacaagaaccaaactcttccagtcattagtgggaagctttaactgttgtaaattgtctcccaccttccttttgaggactccttacaaagccctgtaggacatcgagttagcgtaagatctttgctttgaagattttcttaagctggggtgttgggggtacataggggatacccgaaaacacagatttgtgaacatggtgcagtttttctgaaggacagttcacgacttatttttccttggaaacatttgcaaatatccttttaaagcagtgcagttaagccgggcattggtggtgcacgcctttaatcccagcactcaggaggctgaggcgggtggatctctgtgagttcgaagccagcctggtctacctagcgaggtctaggacaggctccaaaacaatccagaaaagagaaaccctgtcttggaaaacaaaacaaaacaaaaaacccaaaaaaacaaactaaaaaacaaaaacagtgcagttaacagagtgcaacaactattaagtgactacaaattagaatgaagtgccctcattcctgtgtgctgcaagagagcctgtacatgggacaccttttacatatgactaagaaatcactggcacctctcaccaggtttttttccttctagagtcagaccaaggttattttagattttacttgggcccaatttttataaaggaataatgttttggatttagacgctagctactccatagaagttgaggaaattccgtgttcaaagggcatacttcagacttgcccctttgcctttctgcactttgtttactggtaggtgaaaggaacaattcaggtgcctaatggcctgaagctctggggtcaggacaaaccctaacaacccctttgttgctgattgaacctaggggacagtttgccacctttgtcatttcttctttttgaaatactaggaacactgctccactggcctcctacttcccacctatttctccagcttccaccctttagtttcatttctgtatagtttctgttttgatgtcctactgacagctccagacgtcacatgtccaacacactccatacgctaatcttcctgaaatcctgctcctgaaattcccaaccacctgcagcaccaacagtatttctttctaactacagtagacctgagtctccctgctctgtaatataatcatgtgctagccctactgatctttacaaagtgttagtgtgattgtgccacaccctttattggcttctgctgggatgacagtttaggttctttattaggaattcaaggacctctgtgatgtggcttttgtctacctctatagcctgttagatggcctaacatattgaacttattttacttttaaaatcagtggtttcaacctctctaatgctgcaaccctataatacagttcttcatgtcatggtggcccccaaccataaaattactttcattgctacttcatagttgtaattttgctactgttatgaatcgtaatgtaaatatctgatatggattgtcttataagtgatccctgtggaagggtcatttgattcccaaaggggttgtgacctataggttgagaactgctgtcttaaaggtaccctttggaatattccttcctgtaattgctctggctaaatatccctcttaagttctccatagttttgtgtgtctcctgttgaatgattaacttgtgacaaaatagcttcctaatttatatctaagttctctacctgccccctttagcatgtttaagcttcatagaggcagagccttaaatttggtgcctggtagatacttttgaatgagtgtcaattgtatcatgatgtctttttcttcttcataaagtggttaattattaagatctaataattatttggagaaaatctcttacatgcatggctttcaacttcgtcattggcctgtacataattatgttcagggcctcttgggtttttttgtttgtttatttgtttgttttttgttttttcgagacagggtttctccgtggctttgtagactgtcctggaactagctcttgtagaccaggttggcctcgaactcacagagatctgcctgcctctgcctctggagtattggaattaaaggcatatgccgccaccacccagcttgtcctccccttctaaaaaaaaataacttttgagaatttcttgttttaagaatttcttcattgttctgtgttcttaaatctgtctctccttacataccacctatctttgttgagcctctcaaagcattgtaaaaataaagtgtcatctcttcaaaaattcttaaaaggaaaataatctaaaatgttgaagatattaataccctgaaactccctaactctcttttagttataccctgggaaacttgcaaatgtattttagtagacatgttcaaactatgtgtaaatctttagcattactgcttgtgacagtaaatatttgggagaatcaaaatgtctgcctacaaaaaaataaatgatacagtgcagtaattgaactacactgctgtacagttaaggtgttgttattttttttaaaaatatatatttcattatgaactttgaaatctttggtttacaagagtcatgtttttcttctgcttgagatgaacaaacgaggttattatgccacctgctggataaagttagtatagtcttacgaatttcttgacttgccttttgtgtacacttactatctctgtaccccattttataaaatcagttttgaagtaatagactgcttatgcatactaaaagctttatagtcaacctgaatttatagctagctagttcgtggatattgaaataggttgaataagtttagggaagtaagcaaatactcttacttgagaaaaggagcatcatgaaaggaatctacatattttttattttaaaagtgatgtttctttcttttttttttgttttttttcagacaggatttctctgtgtagctttgtagaccaggctggcctctaactcacagagatctgcctacctctgcctcccagattctgggattaaaggtatgcaccaccaccacccggcatgaagtgacatttcttagaaaccataattcattaattcttttattaaatatagattttagatgccctttattgctgtattttaagttatgatgaagacatattttagtcatattaagttagaaaactgactcagcttataagattatttgtaattatttatgaaatgtacaaaaggaatattatgatagttttcaaagattgttctaatctcttttgtaaagtcctctgtactattgttaagtatgttttgaaaattagtctttgagttttgttgctttaatatgttttgtaggtgctggaaagacaacacttctgaactatattttgactgaacagcataatagaaaaattgcagttattttaaatgaatttggagaaggtaagtaaagttcaataactgtcattttgcagtaatattggagaccctttattccactggtgaattgataccctgtacttaaaattagattagatggtattataatatgaggtcactatgaatagtttcagaaaattagaattaatttttattaagctagccagtagtatgaggtatagtggcaaaaggcaacaagagagattatgcctcagccaggtgagacccaactcccgaaagttctccacatcaaacacaagcccctcccccatacataataagtaaaatacatctaaagagactgattgattgattgtggaacagggtttcttgtatgctaagaatattctctctgagctatgtttttagccattaaaaattggaagatttctaatactcattttctagctttttattaataggtattttgttgtacactagttatatacattattttttactgtttttcttcattttgtaatgctttttatggctttaccttttgcaacatcctcagtatttttaatgtttagtctagtattacatgatactctatcatcaccctactaaaatatgaacagaaaatacataaatgaaaaatgaggcctatttcaatatggtggtggcgcacgccttaaatcccagcactcgggaggcagaggcaggtggatctctgtgagttcgagaccagcctggtctacaagagctagttccaggacagcctccaaagccacagatagagaaaccatgtctcgaaaaaccaaaaaaaaaaaaaaaaaagaaaaatcttttttttttttttcttttgctatttaaaaattttccctggcatagatacactgtaaaacatctaaaatcattcttatgataaacatctcatgtgtacttatttcccaagtaagccttactaagagactttcttattgaataaaagtttaatttttaaatgactacatgatactttggctaaaaacccctttgtcaaaatgaagtagggttttaatgtgtatttagaatcctgagcaaccttataacagaaaccaccaactttgtgaggaattaaaaggaaaacaatctcctaagaggttgaagaacctacaaaacccagtatttaaaaagcctatcagtatacttagaaagtttataatggatgagaagaaaaaaatgtcttcagggtatctcctctattaagagatggagtctgacaactaagagtctggaggaggaagaaggtatgtttattaatttgtcttattaacttaaattattttcttaatatttataaatattttttgtgtataagtgttttgcttgtgcgtatgtttatataccacatgaatgcctgtgactcaaaagagggtgttgggtctcctggaactggaactatatagccaattgtgagctcccatgtgcgtgctgagaatcaaatttaggtcttttgtaagagcaacgagtcttcttaacctttaagccatctcttcagcccgctattcattaaatttttaaaaattagccactcattgttgagagctgcaggccagcctggtctatagagcaagttccaggacaggctccaaaactacacagagaaatcctgtcttggaaaacaaaaacaaaaacaaactaagtgtgtgtgtgtgtgtgtgtgtgtgtgtgtgtgtgtgtgtgtgtgtgtgtgtgcgcccaaactaagtgtgtgtgtgtgtgtgtgtgtgtgtgtgtgtgtgcgcacccttggaggccagaaatggacattgaatcccctggagctggagttacaggtagttgtcagttgctccgtgtgcagtgtgggttctgggagccgaactctggtttctgcaagagcagcaaatgctcttaacccatctttacattttttgggataaggtctcactatatagtccaggctgatctagaacttgctttggagcccagttgtatcttaaactccagatccttcagcctcagactcctaattgttgggattacaggcctacaccatgcctggctctatttaaatcttacagaaagaaagttaaaatcatctagagttccataatttaaatatttactgaattaaatactgactttaggttttaccttttgttgttcaaaagaagagagattctggcttccatcatagaagagtcatcagtatactttttgagacttttaagctgttaatagaatttgaagttttattgattgatttagagttatgagagaatacatgttctgagctatagtttctgtattggaatctactgtttctgaacatcctcttgtttttgcttggctagtgaacataatctaaagactgcctgttcttgtttttagggagtgcagtagagaaatccttatctatcagtcaaggtggagaactctatgaagagtggctggaacttagaaacggttgcctctgctgttctgtgaagtaaggagtgggtttactatgtgcttactggctgacttaagatgtctgttgattatatttccagctttggttttcctgtgtagtctaactgaatttactgcatagcttgtaccattataatctttggataggatatacatttgttagattgtgctttctttaagtgtttcttgctgttattttctatttgttctaatgttcatattctttcattgaatttttaaaaattatttttcagtatctcatttcacatgtaaaacaagattattctgaatttaatgtgccattactcttatttccaagtattcaactacttttttctttaaaaaatgtattttatgtatattggtgttttgtctgcatgtatgcctgtgtgccacattcatgcatcatgcccacagagtccagagaaggcactgaataccttgaaactggagttacagacagttgtaagctaccatgtgaatgctgtgaattgaactctgtgtttctctggaagatcagcaattgctctttacccactgagccatccctccagcccctaagtattcaatctcttttaaataaaaaataaatgactgtcatgggctgggaaatgtctgtgggtaaagtgcttctctcacaagcttgaagacctgagttgaagaccagagtaccaacatggaaagtcaggtgtggcagtgttagcttgtaatcccagtgctggataggcagggagactggtaaaatccctagagctctattggccaggcagtaatcaagagaccctgccagaaaaataataagttgggaagccattgagaaaaacaaccaacattggtatctgtcctctacatacacacatgcataaatatacatcaccacacatgcctacacatatacatacacatacgaaagagggaagaatcagccaagccagatcatagctacctgagaggctgttgcaggagtctcgtaaggcctacctgggctaccaaagtgagtcaaagctagcctgggcaacttaatgagatattttgacactgagcaatactttttggaaagaggaagtagtcataaagattttcttaaccaaaaggcaccacattcaatatttaccttaacattcaacctttaccttaaataaggataaaaaacagataataaaagcctgtaatcctagcatttgggaagtggaagcagaacgatttatagttccaggcaggattgaactgtatagtgagaggcttttttccccctaaggaagttacactgtactctaattcagactatagttaaaaggtatgtagtgacagtgtttctttaatttcatattgaacattatttatactggttttcttttacaaagctataaagcaaaatactgacttttataagataacatcccctttgcttttagttttaattaaaaatgaacttattacacatatcatttctgtctgtatttgcacctattttcttcttatcattattaaatgttggatgttttattagaagcttaagaaggacttaatatttgtatgtgcctgaaaatatttttttgtgttgtgttgtgactattttaaaatgttcaggtagtcagttattactatgtttttggtattctcagggacaatggccttagagctatagagaatctgatgcaaaagaaggggaaatttgattacatactcttagagaccactggactagcagatcctggtaagaaatgacattattagtaaccagcatatagttatttataccttagagaactagttaaatgagattaaagccttatttttgcatgtggtgtgcatccatgtatgtatacatgttcaaatgtatgggttttaaccttaggtattgatgatgtagggtctctcaatgaactaagagctgaacttgtcacttttgctggtctggctatccagcttgcttcaggaattcccttctccagcttatctttatttacttccccttgatggaattgcaggtgggtggccatgcccacccagcttttatgtggacattttgggtctggtcttaactcttgcacaggaagtgctttccccgttgagccatttcaccagccctaaggctttactctggatttaatttttgttattgttcaaaggaagagaaattctggcttgcatcatatattttttgagatgtttaagctgttaatagaatttgaagttgtattaattgatgtagagttattggtaggaataagttattttttaataaagatttattatttttgtgtgtgttacaagaagtccatggatgcttgggaagaagacttatttattaaaggataaaatagggaaaaaacacactcacggatacagtgggaatcaacaccgttgcctcttcatccaccaggaaaggatggagaaagctctggaccaggtcaccaaatggtacatcaggaatcctttcacgttcaagccagagagagagagtgcaacctccccccttcaccaccagtctgtatcagagaaaaccatgcccatatggctactcaccctaagtgtcattggctaattggattgagctcccacaacatgtgtgtttgtatgagtacatacctatagtggaaaattaccaatatggagtcaggtagaaatataagggtatttaatagggaaaagccttacttacagagcgacctagccagctggcgaggcagcagcctgtatgcaagccgaaaagagaaaccgaaagcgcaaacgcagtcacactacatcactctgaccacgccctcacaagcgtggtcaggcacacctgtagccagcccctaagtaggcgtggctacagcttcccctacaattccccttttagtctaaaagaggattaaaacttaacagtttaaagtatccaaaattaacaatcataaaggtaaaatataagaagatatgtatgtacaggtgtccaaaggaaccagaagtggctgtcagatccccaggaactggagttacaggtggtggtgagctgcctgacatgggtcctcttgagactgggtagggcatcattggtcattaaggattaggctccaggggggcaggagaaatggctcagcagttaagagcattggctgttcttccagagtacccaggttcagtcccagagcttacatggcagctcacaatcatctgtaactctagttttagaggatttagttccctcttctagcctctttgatatatggtacagatatatatgcatgcaaaacactcatatacataaattaaaattaaaaaataactagccccctgatgtttgcatgatacatcaaaagttactggagtcaggccccaaaatgttgtggtctggtaaaaatgtgggaatttgttttttttttagctgcgttttttctatactttatttaaagacattttcatttttttttattactatgaatattttttcctgtcaaataatttggttctagctgggcgttggtggcacacgcctttaatcccagcactcgggaggcagaggtaggtggatctctgtgagttcgagaccagcctggtctacaagagctagttccaggacagcctccaaagccacagagaaaccctgtctcgaaaaaccaaaaaaaaataaaaataaaaataataataataataataataataataacttggttctatactaatgagaccaatgaattttattttgttcttttaagtagtgtaatattttaatttgttttaatattaatttgtttatatatttgggtttgcaagggaagggggttacagagtaaaggagggagagggaaagaaaatgaatgactataaataaatgagaatgaatacgagtgtgtgtgctgtggtactcatgtggcgttcaggggacaatctgtgggagttgcctctcttcaccatgtgggtcctgggactagaactcaaactatcaggtttggcagtgtgcttccttgcctgttgaacatctccctggcttctaattttcttttttactgtttttgagtaccttgcatatactatgcccttagccctgttttaattgttctgatttatcttctgtaggtatgtttactctgctaatcttatgctttccttatggcagtaatccccctcatactgttttctgttccttactattgtaaattaatttattgattaagcaatggtgctattaaattcatgccaaatttattttattagtaatatgaagcctcatattattctgctctctctcttttgctttcaagttttttttttgtattctattggtttcaggtttttttgttttttgctatgaagagctacttcaaagttatatttgatttcttggattatgtttccttgaaaaatgaatcctttgccatttgttgtcctagtaaattactccattctttttccctttctgacgtttatctgtatttgttttcctctgctaaaatcacgtgtgtgcatttatgcctgttgtgggaaagtcagaggactttcttttacctgttttcattgataaggaattcctttcctttccttttaatatctacattatctttattttttttttcctgagacagggttttttttgtagctttggagcctgtcctggaactcactctatagaccaggctggcctcgaacttacagatatctgcttgtctctgcctccacctccggagtgctgggattgaaggcgtgcaccaccatgacccaacaatatcttcactatcttaccctagtgtgtgtgtgtgtgtgtgtgtattttgagccccagtttgaaagctggttgttactgggacacatgaagagggaagctaatggaagtgggtaaccagacagacagatgaaataaaatagcttttagcttctgccctcaaatatccagtatggctatcttgggtttgtttcacgcacctattttattcttgaagtatttgttttcattgacacttcccctttattgctttccagttagtcctacatcttgcatttttgggagataatagtagaattttgtaaactattctgaaacctcttttggggggtggaaattgagttgggaaagaccataataactcattgtcttagccagtgttctattgctatgaagagacaccataaccacagcaacacttacaaaggaaagcatttaactggggcttgttcacagtttcagaggtttagtctgttatcttcattacagggagcatggcagctcacaggcagacaccatagctaagaattttacatctggatgtgaaggcagcaggaagagacagacactgggcctggcctgagcatttaaaaccccccaaaactgcccccaatgacatacttcctccaacaaggctgcacatcctagtcctgtcaaggagcaccgttccctaataaccaaacattcatatatatgagcctgcggggccattcctattcaatccaccaccttcacacagaactttgttttcaattttgactattacacttctaaatttatggttagggaactgatattttcttattattggttgttctgataaaattttgatatttaaatttttaaaatttgttttaacaggttttgaagaagggagttcctgtaatataattcagaatttctcagcttttgacacaaatgatgttttggatgttggttatcttctgtgagaggcgctgtcttgaccaattatagattatttaatagtatccctggttctgcctaccagtagcatattcctagaagcaactaaaattatcttcaggcattgcctaatattccctggggagaagagccatccactccactccctcatcgttgttatttctaagcacccacatctatagttcagatagttctttcttgtgcattttgtaaggattctgtcagatgtaaatgatgtttagaataaacgctgtaatacacatttataatttatcctcattagaagtaagacttaaagccatttatttgaataaaaagcagtggagttttagagttagaaaactgtgatgctagcatacctatgtatttggctaggtaaagaaattagtacttttttgtttcttactgtttggtgtcgtgatacagtaagtttactcttttccctttattaattaaaaccatgtttttagccaagaaagtggaagtaattcttattggcaattcagttgtttctcacttaggagactgacactctctggttcttagctaaataattgtcatggtaaagtaatttccttcaagaggacagacattgattctgctcctgttactcacaaatcctatttcagtcaaattggaaaactattaagtttttgggaaaaaaatcaataggtatcaggaaaccattagatcttgtggcccttgctatatcttgcatgagtaatcactgtaaacagctgacaggtgtttcactgttgacacagagtgatgcttagcaggaccacatcttgtcagagtaggtagagcgctttggacggtaggatgagttcagttatccttgtttgccctgatgctcattgttttagacagcaccatcactaactgggatggtgatgctttgaaaaatcaaatgctttcccttgctgtcagtttccttttcttgtattgctacacactaatcagaatgtgtggttttgtattaaaccagttcctgtcaaaaacaaattttaatttctttcttttaaatattttttcttcaggtacaaattttgtgcccagtactaagtaatatatgacaatgattaccaccacagaacttgtcatttttcttgttctttttcttctataaaaattacaagtggatttgttttgggcaagtgatttttggagttaatgtgttttatttgcttttccttgggaggaatttattatttgtgaactgtataatcatattcaggaaattagaagacacatccaatgtatacacagctactgtatccaaattgtttcacagtatttattggtaaattattttgacattaatagaagcgtgatgtttgacgagtgctaagatttattgtttttagaaaaagggagaggaatatgatggttgcagatcttaaaaagtcctatcactgtaattctcataaaaagattgaagtataggtttagtttgtatgtatgtttagcagctaattccactggtgaaaaataagactgataaaatcatgttttgcaatttgaagaaataccttatttgatgaatgttattatattatgtattttcaggtgcagtggcttctatgttttgggttgatgctgaattaggaagtgatatttatcttgatggtaagttaaaatatttgtgtttttaggtaaggtttattttatggtttagcttattttgcttatattgctacaccattgttcttttcaaacttgtttaatttttgatgaatcaagtttttgttgatagggattctaaagtcctagtcagtgataaaactgcatttttaggaattgctctcagctctggttcaagacttttactcacgctttcctttcaaaatggtctatagattgcctgtatcctctgttcatggtgcacttagtataaaggtagagctttgtaactagtcaggaagaccctggaaagagcatattcctgctttcatttctccttgcagatgagaattcagaatgctgtatgcatacatatactacttaactcttgtcagtctgtataatttataagctttataccactttcttagtgtagcagctatatttactttcccctgccatttctcctttcttctctttacatttctttaaaccagtcatgtagactgtagggtaagaatcattgaagctgggtttccttgggcgtattatatgtgtgcatcatatagcttgttgaatttcataaacatcacactctgctgttacacttttacaatttgacataaattcagaaattgctgaactaattgatcttttgagaatttaagtacttgctatataaaacaggtttgtgggttaggtatactagcagaggttgggaatataatgccctaaatgcttcagattgccaagtggtggtggtgcatgcctttaatcctagcactcaggaggcagagacaggcagatctttgttagtttgaggctagcctggtctacaaagctaattccaggacacactccaaagctacggagaaatcctgtctagaaaaaccagaaaaagagatgtctcagattctttaaacaattaatatttagaaaagcttcattttgactgaaaagaaaacttgtcttgtattaatttgtcttatttcattaaatattatggaatatatctttattctttatttggactttaaaacatttaaacaccaaagaagttttattttgttgctggcttaatttttaaattttagaaacagagctagtcattatatatatatatatatatatatatatatatatatatatgaaacatatctacttattcccaagaattggtaagagaaaaaaatacttcattgaataatatttatgaactgaaggatgttttaattttccttctcaaatatagttgcataaagctgataactttaaggagtgactaacttgttttttttttttttaggtatcataactgttgtagattcaaaatatggattaaaagtaagttgagcaaatataacttgctaattgtcaaggagtaagaatggaggggttggttgcattattttctgtttttcgagacagggcactcactctggagtccaggctggcctcgaactcacaagatccacctgcctctgcctcccaagtgctgggattaaaggcgtgggccaccaacgcctggcctgtttctgttaaacttttaagaagaaccctttttcaaaataatagtcaactgggcagtggtggcgcatacctttaatcccagcgctcagagggcagaggcaggcagatctttgtgagttcaaggccagcctggtctacaaagctacacagagaaaccctgtctcgaaaaaaacaaatatacatacatacatacatacatacatacatacatacataaaataatcagcttaataaaatatatgagattttagttttgtgaagaactgttagcaaacacaaactataaattagctttttaaacaaaatactgacctatttaattttgaagaaataaaatcagtgcataataagaagaggttcttcattaaatgatacgactgctgaggtcttcaagtgtatttctttagcttcaacactcaaatgcttattgctgcataaggtaaaatagcacttcccagtaattcaatggaagctggtgtagtggtgcacaccttttgtctgggaattgggaggtagagacagtggatgtcagtgagttggaggacagcttaatatacgtaatgaattccaggctagccagtgagaatgtagtgagaatctggtgcagaaaaccaacaaaatttcttgggagttaaaaatcagtgtttaaacattggttgagtattttaccccttgatgtttctaaacttaatttttatgttgctctttcttccaaatcttcaatgaaattatgttgtggaaaaatttgtcaggtctgttcaaatggctatcagtctactttactgaccctttgtaccccaatttgagtactctaatttgagacatttcaatcctgttctagagtttacagtctaaacgtacaaacagaataggactcaaagaaagattgcaaatattatagttttattcagaaaaagtctaatggtgtgctctctctctctctctctctctctctctctctctctctctctctctctgtgtgtgtgtgtgtgtgtgtgtgtgtaagtcctactgtttagcttatgcaatcctgaacccaggctatcctcaaactcataatccttatcctacatctcctgagtactaggattatagttgtggttcaccacaccttgcttaatgggtttcttctttaaaaaaaagttgtaatttgtttaaaaaaaaattttaacatagatttaactataggcattcagagctggtgtaagagggagggaggaaaaggaagggagggaaagaaagagaaacagacttctcagcagaaaaataatcatgttaatggttattttcaaatcatatttcaagaaatgtgaatggcgatagtaaaaaaaacaaacactagaaaacttaatgtttctgattttgaacattttttataggcatgtttgaattaattccctctgtaagttgtttcacaaatttagggtacataagatagcagctaggacattcatgcttttttatatagatttagcatgctttacccaaagtcaaactagtgttttgtgtttaaagaaatagttttatatctatagttagatatagagaggaattaaatagaatcttttactggcatgatggagaccccaaaacaaagcaatgttctaaataatgcaaacatagtatatgtttaaccccttgccaccttgataaaacctcttaaattattaaatcaatatacctacacaaaactgacatactgtcaggataatggaaactttagattttccaagtcagatgtcagataaataactttgcctttatataaagaatttgccaacttgtccaattcctctggttgcaaagcttgacctcagtagctgcttgtgattcagagaattctgaggcagtacaagtaatgacagttggataatgggcagcaatttaagggtgtcatgcttcacagagccagcccatcacaagtaaagctgagaaatggtaccctgtggccagccagccaaattgaaactgaagtggtaattgatatcatgggttatcactctaatgggattgtcacccattgatctgaaatattcattttttaatcatgggcaaagaattggacaacttaaaatgacagctctctattctcaaggcttgacacctaggcactgacattgttcttttcagttgtacaaatgtgacagcatttaatgcaatagaatcaatgaatgaagtttacacataaaaggtcaagtaagaggttttctttttgagtcttctgttgtattgcacaagctattgaaacagttcagtcagaaatcactttggcttggaaaagtccagaaaaataaatagactgacattatgcgataattttttttcaaagctgaaactactttagatctctaaccagtccttgtttaaaaaaaaaaaaaaaaagctgctaattctctcctttttctttgtctgatggctgacatctttggcattggatttgtttccactgtggtcagcacagttctttcttagttaattaatttttagaccattttgatttattttctttgtttgcttgtgttttttttttttcttctttctttcctcgcaggaaagaactcctgtagcccttcttgaagttgtaactatcgtagtaatttattttgaatgattttttttgttccttaattttattgagccatactcataaataaaaattgtgtagatttaaggtatacaatttgctactctgatctgtctgtgtatatgttctaaagacgctgtgaaacaaccaaataccaaccttgcccatctacttacatagctaacagtttttgttagcatatagggtgagatcattctggaaatttctattaccccatcccatagtactaattattattgccatgctataattagctttccagaataaatttccagaatttattcctcctgagaaactagaactgtgtgaacattggccaccatctcacctccttgttttgtttgtctttgaatgggagtttgctctttgaatgtgctggtttgttgggttccttagcactaaagttattattgcctcttttgaaatataaacaaaagctatagtcttcagcagagatgaggaattccttggagataggttgtttttgtttttttttttttttaacttttagaaaactttttattgtatgcctgtataggtagaatagaatatcaaaatttaaatttttgttcttattttataaatggaagtctgacttatgaccaaatatcttctgaatagcaaacaaggttttgatatttttgctaagcttggcttggggaggtaggactttcataaggataatgtagggctgatactcagaaaaataagtgttagtatacatttactacttttcatattttgaaagctttcatatgtgcatagacaggacatttatctctttttctaggatcatcacatgtacttgtaatcagattgtacatattgacagtcttttattttgggagattttaagttatttttgtttttaatctcttatctgtccaaagataatcaaatgttagtctgccctgtttagctctgattgaaaatttatcttggataaatgactcaaaacattgcaagttgttttgtgaaactgccaggttttttttttaaattacttttaagaaaaattttaaagtcattaattttaatatcttttttacatgttatatagtcacaatcagatagatctattgatatgcatgcaatgaagcttccagtagagcatcttcaaaaatatttcagttttaaggattattgtataggatcatccagatgcagattcatcacttttgactgctcagtggaaagagatgtgttgctatatgttttataccatttttcaaataatcagatttatgtgtctatgtcagcaaataggattgttatctacagttcatttatagactgttctaggccctgatgatagttttattctctagatgcagagtatatcatactaaatagatttattaacaataagaatccatgaataattgtgaaaacatgaatattaaatttggtcttttgtcatggagtaagtattgatacaatacactctgttctatgatctctgtaactgggaagtaagtatgtggttgaatttataaaattgtataaatgaaataactatgtcattgttatgattttggttcttttttggttctgttgtacctaattggtatttggtaaactttttgaataaaaaaggatcagttttttactcttaaccaagtctattaaataatcatcagtatgtcttaaattctaagctgtagtagtcatctccccatgaattgtgaaactagcctgacaaaatatgatgtaatttgtacataattctacatatattcttatgtaattattaagtagcattctatgtaagactggttgtacatggcataacagcttttaaaaaagattttaaattgtgttcactttacttctattaagtatgcttgtaataaaaaataataccgtggtagtatgtaaaaatggtattctgtgatgatgagggcactagatttaagttcttttatatatatatatatatatatatatatatatatataatgaaaatagctacttctcattgtcatgatgcctaaatgagttaaaatgttttaaaaatgaaattatttttgattgcgagcttaccctttaatggctaagccatctctccaacccaaaaattaaataatttataaaatttgattagaatgtaaaatactagtgtctagttgtctatagttctgagtagccagccttttgttgtgatagggagtctctgttgagaggtaaggtgataaggttgaaaacatgaatttgcagaagacaacccctgtaacccttatggcatagatgacttaaggatataaatagtgttgagagaggggctgcttctggaggtgaaaatacctcatggccttttaagtcaattataataactaactaaatctttctacatttgtatttagaaatagatcattaaggttttttttttttaaggtagctttaaaggaaaatcctttgttgacattagatttttatattgtattatagtaattattttaaaattttgttttgttcagcatttaactgaagaaaaacccgatggccttgtcaatgaagctacgaggtattcaaatttaaagcttacattgtttgctagctagccagatagaagaagataagtaacataaaaacaaaatgataaggactaaaaaaaatatgaagatagttaaggcaagcttattttcttttcctcccacacattattgctgactacccatcatggactcatgtctagcattttatttaaagcatttatattgtgggataaaatgagtggtggacacaggacttagttgatttgatgaacttagaagattttagcatttagaagcatttgactctcatgctgcttctttgcaattgaagagagttgttttgctcccttagaaattgcctcagtcctccctgttactaagtacagaggagcaaatactgaaatacttttgacttgtcatttaaagcaattttaagtacttttatgttcttaattgttttgtctgtaaatttacaagtatttaaatcagtttccctatcctaagcaaatttttaccaatgggatgaaggttttgaaaccaaacatgctcctgggtttaagaatgaggcctcctgggatttgctacaaatgatctcagcacaggaaattaggattacaagcaaatgattccttgtaatcgtggagtttgatgattgaattattttgtagcccttcctaaatattgtgttgttatgtacttgtgatttaaataaaatgaatttaaatatgattgtgcgcgcacacaccatgaattaaaaattattctctgattaaaaactctgaaggtgggctgagtgatggctcagtgcttaagagcactggctgttcttccagaggtcctgagttcaattcccagtaaccacatggtggctcacatgtatatctggtgtcctcttctggcctgcagggatacatacagacagaacactgtatacataataaataaataaataaataaataaataaataaataaatctttttaaaaaaatctctggaggcttatctttatagaatcagtaacaaataagttttggatgagcttacatagtggcatatgaaattcttctgtagaatgagtagattgggagtaaactgaagccaagctagttcttatttgaaatgttgacttaaatatcatgatttcttaacatttttcttctgacatttgttctttgctgttttaggcaagttgctttggcagacatgattcttatcaataaaacagacttggtttcagaagaggagctaaacaaattagctgcaactatcaggtacagtagatagtacttgactattgtatttaaaagcagaagaaagaatgttggaggagatagatttgtttacctaagtgtgactgtatgtgtattgagatgtcacatggcaccccctttatgtacagtttttaaatatcaattaaaaaataaacctaaattctttttttttttttttttttactttttttgtcggggcgtgtttcgaggcagggtttctctgtggctttgaagactgtccttgtagaccaggctggtcttgaactcagagatctacctgcctctgcctcctgagtgctggattaaaggcgtgcaccaccaccacctggcttctaaattcatttttaaaaaacaatgaaaattattttaaatgccttcaaacctaaattttaatatgtaaaatatttttgccatggctattgttctaaaggaaaataagattcaaggttgacttgcttcaaagatcattaaggaatcacatatattgttcttgactaattgactgttaaataaatagaaatatatatgaaataattcaccagtgcttgcaaaacaaaattcagaatttttaatctgatattctaggtccaccaactccctttataagttttcatttcctgtgtgttctttgactctttcctaaggtcaagcctccttaactccctaagacagttaattcacttttttatgtatatatcttaccaggtcccacctactcacaatattttctcacttgccagtttctgagtccatcccctcctttataatatataatattatatattttcatctgtagagcctattttctctttttcttccattccttaatgaagtcttccttcatcaaataatgtcacttcccttcaaccctccttgattttaatagtttccttaattatcaactctgctttgtcttccagcttgctttatgtctacattgtctatttgcatggctaatcaaaatagaatagtatggatgatactgttactaataaataatataacagtcattttgctggctcgtttggagagtcacattccctttgaaaccaaaggtttcaaataagggtaaaatccagggactctgtcttgaaatattttgtaagacctaaattaaacactaccatatatttcagtaactttccttattggtcacttttagtgtttatagagtttttttttaatataatggatcagcattaccatatctgatcaaatttctgttgaccttacatgttgtctgtagtaacactagttaatatagtatatgctataaaactgaataaaaatatataactaattaagaggtcatttgtagtgattatgattacaagagaaagaaattcatactttttcctctatttttctcttattttaataataatatctttaggttttattatgaaaagtaatgtctcctgtagaaggcagataatattgcatagtgtttaaggatatggagttgaagtctgctttggttgcaatccttgatctgtttctcgacgtttttaggggtttatttaagcttcttaaacatcatcttcaaaacaagaataaaacctatcttataagttttctttaagtagtacatgagccctgtggaattgatggtgaaccatgcccagtgcctgatacttagtgagtgcttcctgagcagttattataggggagagttgcaaagagaagattaagactcttgttaagtagtccaaaagcaaggcttacctcagaatcattgcatacaggaaggcttatccatgagaacatatccaacaagcagcacatattttagctatgtattagtaaagaaaagaggattaatgctacaaaaatacataggtgttcacagtatttaaaggaattaaagtatcttttatggcatacaaagggaaccttttttcctttattttttgtattttgcattcaccatttctacaatgtgtatgtgttaaaactggctatcatgcaaaagttttgagtatacaagaacattaggaatccctgctacttacgaatcatctttttccttcctttttttttttttttgcaagaactgtaccactgagccatatcattaactttttcctaaaataaaggaccttttatacctagtcatagtcacagtcacagtcatacctagccttccagctgtgtgatagattttgagcaacaagttttcttaaatgcacaactagattgtgccagatttgtggtttgaagggaaagaattctaagccattaaaaaggaacatgcaagtttgtttcccattttcaatttttactagttctggttacactagtttgtgtctgtttgttttaggaataattgattttgtatgctttttttaaaagttattatttactttttaaccctccccttttgtatcttatttcagatcaataaatggactgggaaaaattttagaaactcaaagatcaaggtactttttaaagttattactggaggtatatgtcagttaggagattgtttcctaatgtgtataaggccctggagttgaccacagcactgaataaactgtgcatagtacatgtgcctataatctcagcactttggttgtatagccaggaaattagaagttcaaggtcatccttgaactatgtaggaaggcaaggataggttgggctacatggggtgggatgagtgaggaagaaaagggaaataaaacctattactagcgtttagttattaaaaattgataagtgacttaattatgatatagtgacataggtgcattaaagtaacacctaaatatcttcttaatgctgtatatggatttgtttgccatatttagttagtacctttgctaagaactaaagtgctatgatatataaatctgaaaacctattcaggaatcttaatttaaggcctttaattgagtttttaattctttaaagccttaatgttgcaaaaaaatgtagtaagaatacatagttttcatgtttaagttcttaatgcatccctttatttacatcttctatagcttcttatagttctgttcataaagatgtgcataatcttctgaaatagttgtgaactgtacttttgtagattgaactattttccattgaatgttgtcatgatttcagaaaacttcagcgaaaggacattttgttaagctcatgttggggacaagaatggtttagtagacccttctgagactcacagctgccagtctagtgccacccagcctctgagtctcttgctgcaatagcaaagattagaggtgctgacagactgacaaaagtgtgagacagtaatagcagcagctgctctgagcatgtgtgcagctggagaatgaatttggtatgcactttcaggaaccacaaatgcccactacaggcatcgtgcaagcaaatgtgctcccagagttttcacctctgctgtagaaacaagataatctaacacatactctgagccattcctcagtaggtcttcttcctctcacagtctttatttgttttctccctgatttcctttcttttataaatgacaggcatctccataacacttaaattagcttttaagaatcatacctatcagtagctgtgtttctgtagtgacagcatgtattcagttcttattgtctttacttctactttgaaattgtccatgttctaagtaaagttcccccttgcctagcctgttatgtaatggtttcgtttgtcgtgtattttaacatttgctctcttataagactattaatttatacagtgtttgttacttaaggatgagggtgcaagtgaagaaaatctttatcttctcattcttcattaactgctgttggcagtggatgtccaacttggaaataacatgtccttgctgggaacactggacttgagttagagaccttttccataaccatcagctataattaggagtcttactattgggtcatgaatcttatattaagtatttccccaaattccttgagatatatgacaacttgggcttcccagtttagactagagatttagctcttagcaaaataattggagtcattatttttagcattttatttatttatttatttatttatttatttattggtttttcgagacagggtttctctgtggctttgtagactgtcctggaactagctcttgtagaccaggctggtctcgaactcacagagatccacctgcctctgcctcccgagtgctgggattaaaggcatgcgccaccaatacctggcttatttttagcattttaatcccaatagtattttgaagttgacaaaagctggcaaaagtaaaagtattataggcatgcataagcagagactcaccttgactttgtaaaatgggagtaagaattatgtgtggtgttgtcttactagcaaggtttaagcgaattgtcaggcaaacacaagttttaagggattgcatagacttctgaagtaggagaggatgttagaaggcgtgcattctttttttttttaagattttatttatttattatgtaaacaacattctgcttccatgtatatctgcacaccagaagagggcaccagacttcataacggatggttgtgagccaccatgtggttgctgggaattgaactcaggacctctggaagagcagtcagtgctcttaacctctgagccatctctccagccccgaagatgtgcattcttatcttttctggacttttacaattttagaggtccaggtaaattgaatagaggaaaatcaaaatgtccataagttaaccatttcagttttccattggttctaggcattgcagggtgggtttaggagttaagcaacggataagacaaaagtactttgaaggcattggattggtcagtcatttggggaaaactgagaagtgaacaagcaaaaagcagcaccttaccttggatattctttttttcttttttttgagacagggtttctctgtggctttggaggctgtcctggaactagcttttgtagaccaggctgtggatattcttaatatatcacaattgaaatattgtgatattctatagactattagaaatattgactccacagcattctgtaagtataagaaggcagagaaatgaccattcaaattttcttgatgaagagtcgggaaaatttaactaggaaaataatttgattagagtcttaaacagtgaatggatgtttttccagatcatctggagtacaggtgatttttctaggtgtacagaagccttaatatttcagggataatattttagaatgactgatgaggacacctggctgcatgtagctgagaggaagatatatgagtcttccacaaaggaccaagaatgccatgataaatagcaaagggtaatgagaacatttggaaatttagtgctagaggttagcaccaagcttttggaaataacagcaactgtgtagacctggtgaaccctgtggagagactcattgaatttgaaaagatggttattaggcaatcttccctaaagttgcagctacaggctgtataaaacaggagaagaatgaacttttgaagatttattttcctatttaatttaaaatgatagtagtcttttgatcttattgtttgaatgtcttggaaaatatctgatactttatttctgaagggagaaattaaatgaacacattcaatgccatggaaaatttttctagacatgttttaaatgagtacagcctttcttttccaaagcagtgctggtttggggaaaagctcataaaaacttccacgtgggagctcatgccttaccctcttatactgaccactgagaatttggcgagactcccattctttgtggttattctgttgttagtcttttcatttttagaggtacataaaggatgtgctataaagcagagttatctctaagtgacagtgttctcaagaacatggtcacagtggggcagtggtgtgttcagaagggtttttttttacacaaaactggatatttacagaattggtaatacagacttttctttaaactgctgaagtgaagatggtaaatttgtgtggtttcaacctgtctttacaaataaatatctgtttaactgttaagatggaaaaggaagtatgcttaatgctaggattttgatctcttagtgtaaattgatattcatatttcttcattctcagaacatctgagaatgtccaatattcaaagtattgatatagtatattaaacatagaattgtggtatttgttgtttaataagatgggaatttgtttgtctgtgccaagataaagcattcataatctcatagaatgctgtcccgagagtgtggctgcttgctgcaagcgaacaaggcaggcacagctggccagtcctgaactaaaggaggtgttttatcttacatttgtatgcttaatcagacattttgaatgtgacaaatgaacttttgttttccttgttaaaaaagacatttagaaatgtctgacaagctgcttgggtctagtgttaaattgtaattgtacttttgatgtagttttttttcttttaaatattccctttattttagtttaattttgaagtaattgttctctgctcttttgtggacttatgttaaaactaaaaatcaatcatcaatttttgtaaatttttacctctctctgtatttaaaccaaaccaagtgttggttgaggtcggttccttccttccttccttccttttcttttcttttcttttcttttttctttttttggtttttcgagacagggtttccttgtgtagctttagagcctgtcctggaactaatcttgtagatcaggctggtctcgaactcacagagatcttcgtgtgtctgcctcccaagtgctgggattaaaggtgtgctccaccaatgccctttgaggtcagtttttagtgatttgaattactgcattcctaatgaggttcgttcatcactaatcttcagagaaagcatttgttctgacagcattgtgaactgggaagctttaccctacttatgctctcattctgaacaaataaaatcaagcgtgtagctccagaaggagctagtattaatacacaccctggtggttcgactccttttggttttatttattatctttttattttttggtatttaggattgattagtgttagtattccagagccttacacatgctctgtccagatgctgtacttccagctccagagccccagagttctaatattgccccttcctcagccctccccacccccgcagctgttctgaaattcattatgtagaccaggctggcctcgaactcacagacatacaaactgcctttgcctcccaagtactgggataaaaggtgtgcaccatcatgctcagctttagagtcctagcatttttttttttttttttttttagaatttagtttttttttttttttttttttatgtacattggtgttttgtctgcatgtatgtctgtctgaggatgttgaataccctggaacaggaggtatatatagttgtgagccatcatgtggctgctgagaattgaacccaggtcctctggaagaacagccagtgctcttaatagctgagcctattatatttatattatttttctctgggcctagtatttttagattacctattttatcatagagaagatgtgaaagaattaggaaaatcccaaagacatttggaatgtgtgtaaactactgtctatttgttacttttatttcacatttcaggtaatacctgtttagaaaaggttatttagataatctcttactctgaaaatattttaaagcatacagaattataattgaaggacaatcagaagtataaaggaaactttttttgaagcagtaacaagtgatttgtgtgtgtgtgtgtgtgtgtgtgtgtgtgtgtgtgtgtgtttgtgtttgcgcatgcttgatctttaccatttagctacttttaggaattttaggtagaattcactcaccgtatttctttttttccttgcctatatgctggttttcaaaaagatgtaattttattttgtgcgtatgattattctgcctgcacatatgtatgtgcatacccagggaggtcagaaatgtgcatcagatcactgaagctggggatccaggcagttgtgagccaccaagaaggtgctgagaaccaaacccaggtcctctctctccagacccaagactggagtttttacatatttaattatgtaatctctgtgtttacatatcttgataaaagatctttagagatttttctttttgagacaggttttcatatagcccaggctgtccttgaactcactatgtagccaagggtgtccttgagctaaatgctgaaggttgttcttgtcctaaatgctgagattttagaactgtgtcactgtgtccaatttgaaattttattcttgatcaattggatgtatttcacagaattttcaactgtttgaatatatttccttcctttcagagttcatctctcaaatatattagatctccatgcctatgatactctcactggaataaggtatgttttcaatattttggtcatttttttaatgtaatgtgttttattcctgtttcccattagttaagatgccacttgacatacaagtttgttttttgttttgttttctgaataaaaagaaagtctcattttgtagcccaggctggcctttaaactgtgatcctctgcctcagcctcccaagtattgagatcaaagtatgtactaccacacttggctcacaagatcattttaattatgatcatgaaagctgtatctatagaaattataatgtaaatgataactaagcttggaaactcagcaatatttctgtgctaatcattataacactcaaaaaaaaaaaccaaaaaatcaaaaaacaaaactcatgaaatacatagaaaaatctaaatgggtcacagacccctcccttccctttggttaatagatcaattttctgtctcttttggaaggatctttatgataagagatgaaaaaaattattcttttttttttaaatttattcttgaacatcagtgtttgttgttgttttgttttgagacagaatcttgctatgtagcttttgctggcctggaacttgctaagtagactggctgacctgaactcacatagacctgcctgcctctacctctgaagtactagaattaaaggcatgtgccaatgtatcctgctcagttatttatttaattctctaattgtactaagaatatatgacataagctctttcttaacacatttttaagttacaatgcaggattgttaactttaggcaggatgataatgatatataacgcagacttgtaaaattcactgaatggcaggtccttatctttctctcctggaaaccaatatattcaagtgcctgcttctatgggctgaggtattgtaaaaggacatgcatatacacaaagagcacacatttattttatctgttcatgcaaaaataaacatttaggttgtttccacatcttagctattgtaaataatgcttatagtaccttttaagtttcatatgtgtctacttaatatcacaaagatgtatacttctgatttttatgagtagtcatagtgagtgcttctctacttgtgagctataagtaggcacccagtcccccatgtcgttagcattacccaccctttaaaacagctaaaataacccctgaggatatgacattgtcttttattgcacctctttatcttacagagaattttaattcccatttactgtgatttttttttaatacgactactttagtgcctagaagtatgggatatacaaggcagctatttcctcatgttttaaattgaaatccagagaggtagatatgttaccctacaagtcaaggactagaactagccattctaaaacttaagtctttagtatagagttacttttactcattgcttctggtcttggcggttagcataacacagtaacaaattaaaatgaccattgctggagcacctgaataagatctacatttgcttttcttggtccgggcagtaagaagacagtagtaatggcatatgtgaattactatgagtatgtacttatttagatactttcctgtgcatatggtatggtcagagcacctgattgtttcatttcacagtgtggtttccctgctgcacattgttgagtactcaggagttttatatgtaatgatggttgcatatagaatatgcaaatcactaagtattttgatggttatttttcacacaaaagattctgattaaaaaatttcaggttttattgctatatgtttgtccactagagtacagtttcttttcttaagatagaactaaattaagggcatacaattctgagacttactaggaactaaccctaaaggttccttgttaatttcttggacttttttcttgaatgtgacattgtatatgaactcactgtctggcaacactgaaatataattttccaactattttctaatctccttgtacttttgattaagagcagttataatgttttagcagtacctaaaggagtatgtatgtaatgttgtcccccagtaggcctttgcctgtctttctttttgcttagctgttagcaaccagctgtgaaggatttaatttgacactttcccctctaagaccccccagtgtgagtcattccttccacagcagttcctgtagcctaaatgtgctgttactaatttacccctcactgtgcttcaagacagaacatctgcaaggctttaagtccgtccctcttctccctctgccctgtcaccatcactgtctaaatgtgtgctccagttgttatggtagtaatttcttctgcatattggtcttctggctcttctcataacagaacaatgcattcttaaaattctaagttcattttttctttctttcattctcccccccccccccccccgagacagggtttcactatgtatctctggctgtcctggaactccctatgtagaccaggctggcttcaaactcaaagagatcctcctgcctctgcctcctgaatgctaggattaaaggtgtgcatcactatgcctggctttgtttttttgtttgtttttgtttttgtttttcttaactggtaactgactatatagattgtatttggattctgtttgttctttaataatagatatgtacatccaatggaaacccttaacataggaaaatttacatttctaactttttaaagataccagcatattttcttatcaggaagcatggagaagtaagaaagtggaacactacagaatggccatgtatatgtttctaagcctattaaaattattgtattaacctactgaattatttaaaaaagtctactgacatatttaacaatagaatattgctaaaacattcgtttttatcttcattgtacaatacttatgtgttaaaaataatattttctttatttcttagatcagtcagtttttctctacatatatcttagatctctcaactgttctatgcagatgttgcatatatgtataaatttagaacatatgaagagtaggcaaattggaactttgtggtagattcagttatgaaatgtttgtttcttaattggtctgtgtctctgggtaatggataatattaaatcagaagtatactgatctttgaatatgtgactggttgtttttagtttacagaaaaaacttcagcatgtaccaacagcaccccaccttgatcaggtaaaaataaaattttataaaattttcaagtatctctttcaactaagttgattctacttagaatactttttattagatctctttctaacatatttatagattaggtttgcagttttagaagttttacgtctttgggtgtgtgcaatctagtttagcatgaaaaattttcacgtgttaagaagcattctaagcctccatgtttcctgatattatagaaaatcctgtattcaagcttattttgatgagaaattttacctaaataagacccagaggttctatctgctttctgcttaagctgaatttaactaattgattcgggagaaataaaggatggcttatttaaataaaacctgaccttgagttttacctttagtagcactataaatttgagctctgttttttttgtgattccccaagatgatatttaagttgctgggaacaaagtaaatatgttgtctcaaaactgtttctcctaagcaagtcctagagggtagaactttagtgaaactctgtaggggaagtttaaccacgcctgcttaggggctggctaaaggtgtgcctgaccacgcctgtgagggtgtggtcagagtgagaggttcaggtggctgggttgtgctttccatttcacttttcggcttgctgtatagactgctgccgcacaggctggctagatcgctctgtaagtaaggcttttccatattaaatacccttgtgtttctacctgactccatattggtaatttccctctttaaaactccttgatttcatttaaagcggtaaaaggacttgtgagtgaactgtatgcctggccctctgttagaagctgtaactgagtttccaagtctttatcacttgtaatggggcaagataacaagtctcttgtacatttgtcttcattttggctcatgttcattgtgggctgtaccaccacgtgcatggcatatttctcatgagaatataacattcattacctctaaaataggtaagtgagagaaatagtaaatccttggcagtggaattttaagggaaattaaatgtatatggtttttagtagcagtcctaggatgaggtttcagcacattcttactgagctgggtttacgatatcaccttaggaatctgggattaaaagatgaaataaatggagccctcacaagagccttacaatggctccagatattgaaaagtgagaacatatatcccagaaaagcaggtttttagtgcagaagtcttttaggttgactgggactgaaagtttgttctaaggcgatgaggtataatgtgtaaggcaaagaaagaaggctcacactgctttgtgtcagttagagaagcaggacttgtcttggtatctagagatcaagcatgaagattctataccatggagtgaatacctgcagtagaaatggcaaaccatgagctatctgccggtggattagtaagaagagggaggagtggtgggaaaggtggactaactagagggacctagaaaactctagaaacatctggagcacaaagatttgaatgagaatgccacatgcttagcttgtcagaggccaagagcagtaaagggctggagcatggagacaagaggtattgagtttgactgcattactaagcttggttttccagataaagaaaccctttagaagttactgcatagtagatcttatttacatagggtataaaactgagactctagtgagttaactgggaaaataagccaaatcaacaaaccagacttactgttaattttattttaggggaatttctttattaggctttagttttgtgaattattgccttctttttctgcttttgtgttactagccatgagaagagacttagtttagattcaaaccagaaataaatttcaaaatctagactgagagtggtaatacctaggatatgctatatatgagttactgaagttttattcctgagaaatatttactgtaattcaccttttttttatttttcattattccttgcttaatcctaataaagatgagctggtatcagaatatagacaagaaagtccacgtggcagtatatagttgtttttatttgtagaggcaattttgaattcttgggtttttgccacgatataaatagcttttgttgtcttttagttttcctcatatgaagagagttggtatgaaagccacagttccaaagtaggggcatccaccttgaaccctattatgtattgtgttagtttcaagaatcatttgtgcctattgctggagttaactacacccttttaaaataagtgatagcaagtgttgtgttgcctgtctctaatacctgtattcccccttctgaagagatagatgtaggaggatcagcagttcaaagccagcctgggttacttgagactgtctcagaaaaccaaaacatgtccctaacctacaaacgagaaaaatgttcagaaaagtctttaagctaatagtaaagtagcgagtgtactgaggcctgtgttgagacattctcagcagtaaaagctaagtcattcaacttgaatgaaatgcattttttttaagtttttttgaacacaaaattactttctgttgaaagtgacacattatgtttcatttggtaactttttacaatacagctagacacaggattttaggcacttatagtgatctctttaatgacgaaaaaaatcaccattttatttaaatgcataatattactttgaactacccaagacagttttaaagtagatgtttactaagatcttaaaataattactctgtattgttgtgggaaaaacaacaacaaaaactgctgaagtagatctttgtcttctaaagaaattctaagtgtgcattgtgtgtgtgtgtgttgtacagcagaactttgtgtcctgtgggcctcaaatggctctcactgagcagcagctcctcagtgctgccctcccagcaccaagtagctgccattttattttctcatttctgtaagtttaactattttaagtgcttactacaagtagaattgtgcaatacttgttgtattcctggctcattttatctaggataacatcctcaagttttattctcattttactatatggcagaatttccttcttttcttcctgagactaaataagaatccattgtatgtacacatcacttaaaaaaaaactcatttgttgaaataatttctagcttttggtttaattattgtagcaaaatacaggtatagccttcacaatctatggtttccattctgtgtagccaactgcagtctaaaatattaagtataaaaattccagaaataaagaattcctcagtgtaaaactgcatggtgttctgagtagcagtatgaatcctctcaccattctgccgggcctgagtgttgtgtgagtcatcccattgtctgcaggatccatgctgagtacagtacctgcccatcattcactgagttggcatctctgttgccagatctactgtcacaatattacaatgcttatgttcctgtggccctgtgttactgaaccaccacccaaagcacaaagctaataatgtagacaatatgatgcgtcatagaaaagctgtagagtgcttcctttatatgaaaaggtgataagatctctggtcagaatgaatttactatctgtgatactgtgaagaaagaaaaagaaacttgtgataatattgtagttggatttaaacatggaagctataattccagcatgtaagtgcttaattaaaactgtaaaggccttaccttgtggctcagtttcatacaaataccagaggcattgtattgggaagtacttttatatgccttacattttaaagtccaacatgcttttttaagttgacttctgatgtttgagtaagaaaactctgcatattgacaacatcagaggattaagtgtcagcatattgattgctctacattgatgtttaatgcttttagctagtctctaaatttgcataaaaacaattctggagctgggcttgatgatacacacctgaagccccagcatgccaagcttgaaatggggattgtgagttcaaagccagcttggaatacacagcaagaccctgtttcaaaaccaatgaagcaaaaattaaataaataaaacaactgaggcatttttatgttttcttcttcagtcttacgcgatcttctaaaatgcttggagagatgaatatttctaagatgttagacagagttttaccctctttcttcctgttttaaacattttgagcttggctcaagcttcttacttgagtgacactaaacctttgtgtattttcattgctaagtttgaggtttggggttatattgttgttgaagggaggtctgaattttaattaatagcctgttagaggaaactttaagcttctttagagaaaacagatcttttgagaccaggagaaaaaataaatctgaattttgtacatgatgctccaataacctgagccagaaacgccactgctgccagccccactgagaactcctttcactcagcacagtgcttgctcatttagagaccaaacatgccttcctttttgagagagcagaattacactgttgttttgagtggtgcttctgcatcatggaactttagttttctgagcttcatttgcctgacttacaaagtgaactagtccctacttgccaggattgttgtgaggagcagagagaaagatgttctgacacaggcagggtgcacacactgtatgctacactcctttttttgcccaggacccttacatgagggggtttgggtttttgtttttaaatactattgaactaatttgtagagctgataattcccaaacaaagagggaaataatgattaataatattattaatcagctaaagttccataagtatggctcttttcttttttcatcttaaaactggttatagttttaaaaatagacagatgatcctataaaaattatggattattctcttgatttacagagtattgttacagtcacatttgaagtaccaggaagtgcgaaggaagagagtctaaatgtatttatccaggtgaatgcaattttaactgattaatgattcatcaactgtttgttgcatagttgttgcatttgcagtggttggtcttatgaaattgtgttgcctgatacagaatctcctgtgggaaaagaacatacaaaacaaggacggccactgcatggaggtcatacggctgaaggtatagtatgcaatttgccctcacagactttggagagagtatccttttcttggctgttatataaaaaacatatttgattttaaacaaataatagttttagtacaaataacatttgtctgccctcattttcataatttccattgctgaaaaggagctttagaaatcactataaaaacaacaacaacaacaacaaatgatttatttgcacagttttatttagtgcttcagctaaaacaacctgtgtgcctgggatgttagtccagatttcctctgccaggtgttcccagcagttgtctggctcataaacttgacactgtcaaaattgttctttctgcatagattggtcactaagagaaatggtttatttttccaagagagcttcatttaacagaaaaataacattgaaaattctgctactgctggaccttatgttacttgatgcatttagcagacactataaacatttgttatattttatataaaggcataaaacactggaattcttgttcagttttggaaagctattcatatcagttgacatttagatgtgtgtgtgtgtgtgtgtgtgtgtgtgtgtgtgtgtgtgtgtgtgtgcatttttgtttgtctgaatgtggatgagcacataacacaatgtgcaggtagaagtaaggacagttttgtgggagtcagttctcttctactgtggtttctgggaattgaactcagttggtcaaatttgagaggtaagtgcctttaccttttgagtcagacaccttgccactcccacattgaacttttattcagatgaatagagtagctttgtatttgatcattgcctaaatttattatatttctaaaacagattcattaagaagataccttaacttctcaagttttcatgttaagtttatgaaagaagtaccaatcccttaaatgtagagaaattagtatgatatggtgtggtaacagacttggtcactttcagttttttattgtgataaataacattgaaaaagcctactatattttatcattagaaaaaggaacctttgctagtcatggtgatgcacagtcaggcaggtgaatttctgcaagttcgaggccctcctggcctgcatagcaaatttaaaataagctagggcttcatagttaagaccctgtatcaaaaaaccagaaaagagaaagtaattctttattttaaagaagtagtcaggcattgtggtgcatgcctttaatcctagcacttgggagataaagaccagcagatttctgagtttgaagccagcttggtctatagcaggagttgtggaccatccagagctacacagagaaaccctgtcttgttttaaaaaacttaagatatgcagataatcgaaatgggtgatttttttatagctttgttatgagtttgtcttttgaaaagtagcattctcaaatctgatgtattatttctgcttgcacacttgagctggagctgaatggttactgttctttgagcagggcctggtgtccatcaaagacaaaccacagcaaatgattctgcaaggcatccatgagctgtacgagctggaagagagcctagtaagctggaaggatgatgctgagagatcaagtcagctggtctttattggtaagtagcaaaaatttctgaaggaaaataacaagaataggtttgtaggagatataatgtgttaattaaccaatattacctaaataaacttaaaatttctgaaggaaaatagaataggtttgtaggtgacatagtgtgttatttaaccagtattagctacataaacttgtgcatttgtctgaatcacagataatataagattttctagaactatgctcttcaggtgacttagaaaagtgattacttcaagcactaacttggattggaggtttaactagaaagttgttgaaggaatcatgtagttactgttgattttgtagatcactagagagagcaccatgcatttaacaatctggaaattcaaatgttgttttaataagcctcatgtaatctctatcttgttctattctcaggcaagaatttagataaggatattcttaaagaactcttcctctctgctgtggtagaaacagaagagttgaggacagcacctggcaaagaccaagtttgtccatcacactagataccatttcttaccaaaagaactgataagaaaaacaaggatcagttttctactgggtgtattttaatcctgaattctttcattacctctcttatgagttaggagtatactttatgattaatttataaaatacataaagttttagtaaatcattataaaaaacatttgatattcatacaataaaatatgtcctatgaagtgttttctgagacaagtatctcataaaaattccagaattttctttgaagtttaagcataaatgctgacaacttatgcttcattatttgtaaaaatgatggcaaactttaacattttcattttccctttaaacttcagataactgcagagacataatgattgtattgatagtaacaaaaatacccaaacaagtgctgtcattgtattttaaaaaatgtttaacctgtatttttatgctatgtgcatgggtgttttgcctgcatgtatgtctgtgcaccatgtgcatccattgttgaggagtccagaagaggccactggatcctctgggactggaaggtcctctggaagcaatcagtgttcttaaccactgagccatctctttagccctgtcactatgtttttaatggaatgagtctctagttcctaaagaggaagaaatctgagtcaaagaaataaactgtctcttacaatcagtgtaatgatgcttcagctctttgttctgtattagcttagaagactgtaattgtgaaatgttaaactgttgttttattgctggcattaaattcatcttgactattttgaactgtgttagttttctgtataatctgagaagtagtgaggtacattacatctactaaccataactacagattgtgtgtgtgtgtgtgtgtgtgtgtgtgtgtgtgtgtgtatgaacacatgtagttcagagaacaacttttgagtcagttctctccctccagcttgttttgagagaggtaacttattttcactactgtgctgtgcacaccagccttgggaacttgcagccaattctcctgtctctgcctcccatctcactgtagaagtgtcattgctgggattataaacccaaaacaagcctgaattctagttgccaaaggtttatggtaggtacttttacctgtagcccagccatcttgctggcctcaaagataacttaaaaaatatatatatttctaaaatttatgtatatgtatgctctcatatgtgaacatgtgtgttggtatctgtggagacctgaaaaaaaagcatcaaaaccccctcaagctggagtaacatgcagttgtgagtcgctgtgcatactggcaactgaattcaggtattctgcacattaacagtaagagttctttatttttaattataaagatcttttatttgtgtttctttcatgcatcatactgtcgaggaagcagtcctgcatatgtgtctgcaatggcacagtaccacacacatcgtttaaaggcaaagcactgctggaggaactgaccagctgtccaagtttctcagacctcaggatcttctcaatttacattggttctcaaaatctgaaataccatgtccaaaaaatgactaggagtgtgttagtcatagttctctagagcagtggtcctcaaccttctaaggctgagaccctttaatacagttccttgtgttgtgctgacccccaaccataaaaattttttcatagctactttgtaactgtaattttgctactgttataaattgtaatgtaaatatctaatatgcaggatctctgatatgccacccctgtgaaagggtctttgactaccataaaggtgctttgacccacaggttgagaaccactgctctagaggcacagaactgagagagccaacaatggctgtctcctgacaagaagaatcccgcagttgttcagtctacagggttggattctcagttggtcttcagtatatgttgggattccacagaagtaggtctaataccagcaaaggaatgcctaagcagcaggatagatgaacttgccagaaaatgagaccaagcaggcaaacaacaaaagtttcttccatgtccttttatgtgggctgccaatagaaggtgtggcccagatttaggctagatctgctgacctcaaaggacccaatcaagaaaaatccttcacaccaatacccagcagcttgggttttagttgattgcagatgcagtcatgctgacaagcaaaattagccatcacaggggggttgtaaaaaaacagtcactttattcaatattacagttttagaagtggagtacatttcctttaagaaataaaaaaactaggaagaaaatgccgcttaatgtagttgattctatgatagttggtacagaatagatcatcaggacaagtgctgtaatgaactctgataccaagggattccggtctatgctttaatatgtctgctaagttgttacccggtgctgctcttactctgctgttcatctttctccacactacacaaggaagtggttcagcctttaaaacttcattaataggagtaaatccaggatcctttgatttcttaaaaagcactcgcccaccaggtaacctggcagtttcattctcatgaatattgtaaccatgaagaaatttaataggacacagacaaagccaacgaagagaagaaaccgattaagttttgaatatttggagcattggccctgtctaggatgaggtaacctaacccacctttgtcctttcataatatattgtcttatttactcagtggtttctggtgcctgtgtttatcagacactgagccagcacttggagattcagtaagaagatcatagattatttctctagtgatgtgcaataaagacaccaccagggcacatgccgtcatggtcagtggcatgtgcacccaaggtggcttcttccgcttcaagttggggcattggagcgctaagaagtgaacttggtataactgagtctccatgtccagggccagtgctatggcctccagcctaggaataaagagttcttaattgaaaaaaaaaagttcttaattgtctagccaggcctctagcctcagataacttttgatagtttgtagcacaagttctagtaggtcttaataaaaacaggaaatcagatattagggggtgaaagcagagagaaaagcagagcagccagccaccagttcttttttttttttttatcattttttatttgaattacaaacaagattgaattacatgacaatcccagttcccttctccctcccttcctcccctaccaccccccccaactaaaaccctacctatcacatagcctttcttctaatctacacctgactcgacctttctgctccctcatgacctttgcgtctttcctcttcccttctcattcttgtagcttcctcccccctcttcccatgctctcaatttgctcaggggatcgtgaccctttccccttctccaggggacaaagtcagtcaccagttcttacctctacaaaatcctcagaccaaatggggtatcctgtctctacaagtcctcagacagaatgctgtctctatgaaacctcagactgcctgcaatgagctcccgtctcctaccttatattcctctcttcacccagtcatatcattcctgtctccacctccctactgctgggattaaaggcatgtgaatccaagtgctgggatcacctttatgtgacctctgtttctcttttagacagattcagtcttgtgtagcccagggtggccttgaactcacggagatctgtctgcctctgtctcctcggattattaaaggtgtgtgccaccactgcctctatggctaactagtggtttagctctgcactctgatctaaagacaagctttattgttagattacaaacaaaatatcactacattcagtctgaggattcatagggacaggatggcccctttggtctcaggactcagtagaggtaagaggtctctcttgtggctgttcctttacttctctgacctttgagcatttaccccaatatctgactctgggtttttattactaatacctattagaacttgtgctacaatagttagtgatttttatgtgtgtctctctggaataattcagttttctcctattcttagtaaaagccaaaccagcatttactgctcagattgtataggtggaatataatgaagagctttcccaaactaatggttgttgaacaccatgctataaaaataacttgggggttagcctaacccccagaatttaattaattaggttaattaattacttttgagaaagggtctgactgtgttagctagacaggcctggaactcatgaccttcctgcctcagcctcccaaatgctgagtggttgtactgggtgcaaaggggaggctaattgattgagtgatctcagatagattattactgttgttttcttgtgggcatatcagtgaaggagaacctgaccttctttcacactgatgtcggtcttgaaagtttttcttatcattcacttatctctgaaatactttctcattgttcatggtttagaaaatgcattgtattttatggcaatgagcttttcaatagaaagttagctaatatttcactcagatatgggctttaagtttattcataataatattttttagggctggaaagatggctcagaggttaagaacactggctgctcttccagaggtcctgagttcaattcccagcaaccacatggtggctcacaaccatctgcactgaaatctggtgccctcttctgtcctgcaggcatatatgaagacagaacactgtatacataataaatcttaaaaaaatacctataaaaatatctttaaatgccacaataatattgcttggcaaataataaattttaaacgtatgtgttctggaacacaaagaggaacttgtttgtatatcttgtaggggatactttttgaatttttacttatttatgtggatgtgtgtatctgtgtgtgtgtgtgtgtgtgtacactgcccatgctgccaaaatccaggatcccctggagctggagttagaggcaatttgtgagatgctagatgtgggtgctgggaacccatcaggtcctcttcgagaacaagtgttcttaaccacggagcgctccccagctggtgatgctcataacagcctttcttcgtatgatgcatgtgtgtgctttgtcttcaagtgtttctcagtgcacacatacatataaaaataccagctctcctcttcatgccatcactcagaaatctttctgcttatacattgtttgcaaagtgaattattttctggagatcagagtcatagtctgatagcctcagggttttattattatttatgtgggtgttctataaaatatacagtttagggtatttctatgacactgcaaataaactttattctttagttgctttataagaattcagaatacaacatagaatacattcatgcttgaaaagtttcttgattgctctcaagtttgcttggtttctatgcctataccataatggcatacaatggataaagccgggttctcaagctgcatagtctgatggaagggaaaacacaaataagaaagtaggaagtagagctaggccatctgctaaaagtaaagatcaggtttagaaggcatggtcatggaaggaaaaaactgctgaactgaaccaaccagtgtatttcaaagatgtactgacctccgtatggaaacccggacatgtgttacgttagggtaggggtttcgcatttgtttccacaggagaagaaaatctttggataccatcaaaattgatcaagattcgagttgaagaagacaaccctctcaacgaggatgactgacaggtatttactgaggtataactcatgaactaaataaaagcctcccaaaggatgggaagtgctttgttttcatcctcacagaacccacctccgcaagtcaaaggacactacatgtgtagataattaaggaaagaacgtagctgtaaccatcgaacaaaaggaacgtgccatacggtaaaatttacagctgtctctcaaataactctatttctcttcatttcctagtccctattcaattaaatcgacgctggatttagagttggatttggctttcctaccctaaaatccaagcatgttatttaacaacattttaaagtttctgtgttatatcaagaagccaattgctgtaatacagaataaatgaagaataagaggactatctttgtcttttcttggttctttcttccaaggcctacaccctctcataattgttgtttttcaaggattgcctttcccggtacacatacatgtacaagtgaacatttctctgatgacacttatgtttgagtcccatacagccaatgagaaccagcctgacaacaatccctacatgctccggaaaaagaattggaccacacctccccgactgcactggattcaactcactccgtttcgactgacactccaaccaaaacttcgagtaatgacttcaatcaagttgaggatttcaacgtagatcttcaatcaagcaaatctcatctaacatggactagacataactcattagagactttccctgtactagcattttttttctccacaggaccccacatggctaccatcatcccatttcagcaggaagtaacctagaagatgctacgcccctgttccccataattgtttattagggtagtgtaagcctagttaagaatgaccttattgtttagagttgggattggaaggaggtgttcaagttagacaccctttccacatgactttaagacttagctggagtagacataggatgtgcaatagcagattattgtatcttcttatatttcacctttatgattgctaattttagacattttacactattaagttttaatccttttttagactaaaaggggaattgtagggagacaccctagccccgtcccaggcaacccaaacaggtgccaggtggacccgggactcacccatgagggcagggtgaagggaagtcggggtgacggggtgacgtaagggaaggttcttaagggctgcatgtggagaccctggtcccttcttcctggccgcgctagcttgcttcctgtgagctcactctggcttgcgttttgttctggtgtttacctgaataaagaagtcttaccatcacggatatctctgagcgcacacggtaatcctaagatttggatttttttttcctgtttttgagacagggtctcactgtgtagtctaggcttgcctgaaacttgtatgtagagcatgctggcctcaagcttgattgagagagctgcttgcctctgtccccaggtgctgggattaaaggcttgtcaccatgcccagattacactttaaaaagtactatttgggtgggcggggactatggctacgacacatgtgtaaaggtcagaggacttctttacggggttgatcttttccttcacctgagtttctggtgttgaactcaggctttattcacgagtcatctccttggcacttggattactctgaatgcactgggatgccactagaccattggaagctgagagatgaggagtccagtagttgtccctgccttgaaattgaaagtggtgctgtcagtgagcattgttgcccacacctccagagtatgtgtgggaagtcactagtgtgtaggacttgctcatttaaaattttaatagatatttgtaaattgccctaccaaaatctttatcttttcccatcattcactagtatatgaaagtgcccattttccaaaatacaattaaaccatatttcagcttttgctgatctgaggggatgagtatatcactgttttatattttattttgtattgcatattatttttattccttaaaaggtatattgtcctgatttttttttcatttttcccagaatcaagaattttccagttatcagagtattttttaactgtaacttctggagactttgtatcttgcttctgcaattctaaggagccggttttgtttgtttgtttttgtaatgaagtaataatgtgggccaccaaaggggtccaatgatccaaacatcacaggctattgcaaatgctattggttactctccacacttgatggtaagcccctactgctgaggatttatggcaaagaacatagagaaatcaggctagcactttcatccctactggctaacacttacagtgctggaaggtgctgtgtgtgctacaggaggagaaaggtaattgtcattttcatccagctatgaaccctggttgctgtaaggacctgcctgcaagttacactggtgcaacagtggcaatagtgttattggagagctttttttttttttttaactcaaggcccattccatgatttggaatccatacctgacactgttattaaggccaagaacctgagactagataggtactgtgccctagggaaaacctgctattatcattctcctaaaggaacatagcagtaaaataacccctttttctgtttgctatatgcatagatcagtatatttctctaccatcatcagagaagtttctcctagtagatgataattgacacagataattagcatgattaacatgtagagagagagagacagagactttggataaatgggatgtctatcacactcctcctctcaaggcccagggatttgtgcagaagagggggcttattcttaataaactgtttattcttaataaactaagaaatttggttgcatataaaaataataatgtgggcaagcacaggatattctgatgatggtgatcaaggtttaaatatggttcacctaatactttatagttcactgtgggatacaggactagagactacatttcagtgagcccctgtgtccctatttataaagtggaggtaacacacaatttcctctggattgtcccaacgattaaatgtcaattatgctgactacaggatccaagtgaatgtgaatttccatttcctagcaaggtttgctgtacaatttagcctctacataatctaagcaggcctgtgggagcccttttcagctttaagtaaaaggggacgagaaaatcggtaccaactttaagacagttgcagaagtgtcggcacagttgtgggggcagagatgatcgacagtcagcttggtcagaccttggagcttcatgcctctagtttcccctctgagtggctgtctatgtatgacctagaaaagaccctctaaattactcatctaagatgacttgggggttcctaattatcttcccttcttgaaaacccagatttcttttgtggacttttgctgaattatatcaattatataatgtataaaatatctatatatatatatatgaatgatataaaaggattttaaaatctttgggggtctgagggtataactccatagcagagcgtgtgcttagcatgcagaaggggttcattctccagtgttggaaattattcaaaccaaaaataagaaattttataagtcaataatccctagactcaattttaaaggtaattatcaacaaaataaaagctgctaaagcaatgatgatcaataatctgtgatagtataggcttggtggcaatgtgtgaactgggtaattataacctgtagcttactagcctaggtggaaaaactgtatatttagattgctttgaaaggacttgtccatgtctagaaatgccttatatttgtgaacatggtgttgaaaaaagtgaattctcccttaaaatgctaagttgttttctcagaatgaggctttttaaaactagtatttgttctgggaaaacaataacagcaaaactgtttagtctttggagagttgatcaccaagcactgttgaattccactgtctggggctcacttcaaatgtccaggagctaaggaaagggaagaaaagggaagacttgaagcttaggcaacatcaatgaggtagaacagtgagagtcctttcttttgttcttcagtgtgaggaaccacaagggactttccccaggacattcaacttagttttcattgctacagctcttcgttttattcaattcatagtcccatacaattgacatttttactaaagtatacagttcacagatttcactaagtccacaagttagctaactatttctggtatctaattgcagaacattataattcccatccaaagaagcccatgtctcttaacaagtacttcccatgtcccttacactattctctgaagagttgtgtattcaaactcctttaatttagcatgattcttccaggcccatctgaatgaatatgtatcagtacttcattccatattgctgaatagtattccagtgtgtggttacatcagactctgtgtatgatgagttgacaaagacttgagcttttaggtccttctgttaatgatcactcccaggcccttgcacgatggagaactgaatgtaaggcttcatatgtgctagacaactctctgccactgttttaaaccattgaccaaaagtgacttaggggaaggaggggtatatttcaacttaccttccaggtccatcaccgggtgaagtcagggcagggaggcaaggcaggaacttggagcagaattgaaccatggaggaacaacgcttgctaacttatgcttagcttgctttcttgcatagtccaggcccacctgccaacaatgagtgaccagtcaagacaatctctcacagatgtgaccactggccaatctgatgaaagcaattctctttcagttgaggttccctctcccccggtgactaggttgtatcaagtagacaataaaaactaaccagtacagcagccctctttctactttgagctgacagctccctaaatttcccatgctggtcttaaatgccctcttaatagacctagcaggtcttacacttggaatcctcctggcctagctgttctagagtaaggttataggcttaattcatcagaactggctaaagttttaagaattaattgtattgtattgtgtatgtgtacgcacttgtggaagccagaggacaaactcaggcattattctttgggtgccagccccctccttttgttttcttttttctatgtctcattattattattattattattattattattattattttattattttctgtcccaaaactctccaagtagtctaggttagctggccaggtaccctcagggatctgcctatctctaccttcctggccctggcattacaagtgtgccaccatgcctagcatttttatgtgagttctggggatataactcaagaccttgagcatgcaaggcaagcacttcaccaactgaattattcaatacccagccctagggtatgttaaaggctgagatttatagatgcaccagcatctcaccatgctgtggtactagtggtacagtgttgtaagccaacattgatacaggctctgattgtttggaatccttacctcatctttattctttttctattgaatcccatccaggatagaacattgcactcaatagtcttctgggattcctggagacagtgccttagctataccttttttcacgcccttggctcttcaatcgggacttgtcctttgtagctaggatttgggggacggtcattgaaatgggagtgacattttcatcacatcaagtagccacacatcaacaagctgcatggtagctgatgctggttttccttccctggctgaagtttgattagatttctccataagaaaggctactctttccctctttctattgtactttgtgggagaaaaatcacatgggcagcccacacagagagtagttgggaattagacgccttctcgaatagctccataagttatttgaaattctgaaagagagatttcatttttttagcaacgtggacacacaaatacttatttgacaacttataacccagctaccgtgctcggttgcagattgccccagctttggccacagggagctctttagttgattcctgtgtcacctttgagatccacccacaatgtggggtttttgttttggttttgagcatatccttacaccctttcatttgtaaataacacaaatccccacagaagttgactttaagaaaaccaacaatactctttctctcaggtaatcacagaggggcactacatgcccccagcagggggtgagggcagcatctgggggtatcagattgaatgagacacctgcctggccctcctgcagtttagaatcacacaaatagtccttggtcaattttagattcaaaagcaaatctgtcaggctcagatctgtttgtttgtcctacctcaagcctcacaaaatagaaagccttggagggtaaagacctccacagggtataaagcttagctccaaggctttcaagggagctgttctccaaaaggagaaacatcccttcatattgtgttttattagattccacctctggaattccccaatatgttccatggtggtggattttgtcttcagtctctatataacaaacacatgctaccacattgatgctttagttgctgggttaagtacatgaaatcaatctaaaagccttcaagtgagttctgggctgccgtcctgccctgcagtgtggatgtttctcgatggactccggtgtatctaggggcaggaaagctgaagcccagcgtttccctgtttcgtgtttctggatggatgttgggggtggcgggtaaggacaggcaggcagacccatacactgggggaattcctttatttataggactactttgggggcaacagtgctttttatgatgaaaccaatgtagttggtcaagactattaagaaaaaaagtatcagttgtcattgggggtgaaggatgttgctttctgaagcctcttctaggcatacctgtctgtagaagataatatccacctttgtttctctggctaaatatgaaaagaagttggagaatcagggctgtaaagagactaaggaaatactcttttattgaccgtttaaaattcacactgaatttccacagtttaatgctaaagtgttttaagcattagagaaatcgaggtagggagaacatttggtgatgcttttgtggaggccaggagccatttctctcgaacagggcatatagcattaagtcggtgagccattctgtttgagatacattcctttaccctctgagcactgcgccaaagcagtggtactcagaggtctgagtgtccatgtggtcacaggtttttggatttcatgtttccctccctgctttttacttgtttagttttagagcaaaattaaccaagcccagacaatgccagagcactttggctggttaaaccaagaccagagcatcctccttggtagtgggtgggttgaggtagaagagcggaccgagaaccctcatcattggactgcgtcaggaggaagtggcttcactcctccctccgaggaaccgggaagaaggatatatagcgggaagcccatcacatacgtctcagagaaacttagaacactaagtgcaccttgctacgtggtgttggaacaagaaacagaaggaacaaggaagcctgactcaggaacgctccagcttcctggaagattcatcccagctaacccacccaccccaaaccaggtgagctgccaccacgtcccacccctcctctccctcccagtctccatgaacttggcaagagccgggcaccttctctccactccgcagctcagtcccccaagctccgaccgggatgaggttgaaatcgatgtgctggcagagggggaagatggagaccaggcggaggacgacgaggagaaggcagagaggaaccagaagcgcctggagccgccgctgccggggcccggagcccgcacgcttcccgggagaagttcaggggaccgtggcggcccgagtaactcctccgggttcctccgcaagttccgagcgccgcggacagccgcgactcccgccgccgacggcccgcagcccgccaagcccccttattcctacatcgcgctcatcaccatggccatcctgcagagcccgcacaagcgcctgacgctcagcggcatctgcgccttcatcagcggccgcttcccctattaccgccgcaagttccccgcctggcagaacagcatccgccacaacctgtcgctcaacgactgctttgtcaagatcccccgcgagccgggccacccgggcaagggcaactactggagcctggaccccgcctcccaggacatgttcgacaacggcagcttcctcaggcgtaggaagcgcttcaagcgccaccacccgcccccgggaggccacccgcactgtcccttccctccgcccgctgtgcctgccaccctgcacatctcccacccgggtctcctgctccgctactctgccccgccgctgcctggcctcggagcccatcccgccgcccctcccgggagcctcccgcgcgcgccgctgcatcctcatcccctccgctacctgctgcttgccgcccccgcctatgccgaagcgcctagaaaagccgaagatgcggacccggccacgtcccgcgccatccccgcgctgcaacccgcgctgggcttccagccttgggaccgggacgagggctcgggatctccgcccggacgcggctcgttcaccatcgagagtatcatgcagggcgttactggggctgcacagagtccgccctccgctccgtggagctactgccacctgctgcagcatccgtcgtgcccgctgcaccctcaggtcgttcccccactgctgcaagtgtccgccgccgcccggacagtctttcagcagcagcagcagcctcagcaggagcagcagcactgtgccaggagctgcgccccgggtaaaggcgcgcggctgggccggcacctaacggccgttgcagcgttgctgagacatcagcctgccagtgaggaatgcagactgacaactctggctgctctttcgggcagagaggagaccttgcctgctttttaaacaacatgctcgccccaggctccgggctgattcaccctgacacacctggagccaagtggcagggtgggaccactcgctgtctaggtttgcaccacccgcctgctaggcttgtgcgtggaaaaccagcagcggagcatgcagcaagtcccgccaaaccgttactactgtgttctgctcccttgatgaccgaactcagggaaatctaggggcttgaagtctcgccttttcttgtccgcttcagtgtgacttctgcagcttttccgatttgcatacatacttcccaggaacctatgaacgaagaacgtgagcgagatgtttggttgttaataaacagaacagctggcaacacaaaaacacccccaaacttcattccctagggactgcaagtgttccccagtcaagtgcagaatgcatatatgccctgattcccaaaatccgtatgtaatagaaatagagtaatttcaaaacatgtttttcttgtatatgtgatgtgccctacttcagtggggagtgttgaaattaagcctagtcgtatagattgaataaaatactaagtcgggatgctacatcgcttgtttcctattatgtctctttattcgctttcataattggcatttcgtttggaatttaaatttttatctcacaattcgtttttatgctttatgtcacttatagatatcaggaattttaagtatggactttaaaaaattcccagtatttgtggacaaaagttcatcttataaaatagttttagtacttacaaaacttctagaaggaaaataattagaggaattaataaacctccattttctcccttccttccttccttccttccttccttccttcttccttttgttctttgaaagggaggtttccgctgtgtagctcttcgtggcctggaatcagctatcttcctattccagcccccagaattcttagtatgctctattatgccgactttattcgttatttttctaaagttgatttttcccctgagatattcaggaggatgactggagatcgatttgaaacaaagcgttatctactcttggaaaataaacggctatcaggtatattaaaacactagtattttaatggcctttttccttaaaaaataatttctgagaggcctttgcaacagtgattcagcttcagggtgcaagtaaaacaagacaatgcccatcacctacgactgccggagaaggcgggattttagcggttgggtcaatggtaagagggttctgtaattcgtggctttgggggaaagtcaccctgagaagaggaaactgtctgtgctccccactctttgcaacgaaatccacatttccttgcttacactccatagcccagaactcctacagttcacccaacccgataccccacaaccctgagttgagtgctttgtggcgccttctggaaagttcctaaactcagaccttggtagagctttgagcattcaaacgaacagctctcctcctcttggcccctggcccttggcctctcagtaccagcccttcggtggccagcagcagtgtgagtttagaggcaaattaaaaaagcgaagggtcctctttcccacttctctgcagttctgctttgctcattgggcaaagacgtcccgagcctggccaccttcagcttttcagttaacactccccccacccccacccccgccccatcccccggaccctgggtaggaatgattcctggctgggctccagagcacggaattcccattcctatcgcgcccaaacctggcccagcaggaggctgagcggctggagtctggtccagaccagtccctgaattgtaacgcttttctattgaaactgtaacaaggccagaattcccaagacgtttgctggaatggctggtaagatgaaggtcgttccaggagtccattggaccatagcgccctgaggactgggacagctccaacctcctccgggtgcgatctgcccagttggcgggggagcaagggacctgagaacccacaggaaccccgcgcaccagcagtgacgcaggcagcctgggcgtccccatggtgccaagtccttggagtattcaggggcgcgtggctgggacgctgcgtgatcagtctggtcacctgcatcttctccttcagggccatgcggagccccagcccgccgttctggattacacaggtgggcgtcttgggctggactttaaaaaccacgtggcttctgagaccctgaaggttggagggtctagttgtggacagactgaccggatgtgcgcagaacagaacctagtgcgggccactcccaccagcatcagcgtgctggagggagctgtcacagcctctgccttctagctgctctggtacattcactgaggaacactcgctgtagaaccccacggtttgcagagaactttcaagtaggagaaattgtctcctaaggatcctcgggtggcagcgtcaggacccatgtggtttctaactcacgaattcttcaccacgtatgaactcttcacgcacgtgcagcctcttgcccgggcctcctagaggtctcaaggtcaagacaaggagccgatcaggtcactagtaccgaagtagctgggaaggaatcaggaaagaatccaaggaactcatctcatttcctagattttgttccggttcctcctgatggtccctaagaaccctggagtaggagagatttccccaactcctaacccacatgcccagagccagtttgaaacctgagttcaaaggaccagtgggtgagaaagtttctcaagtgcccagtccttatcacaaacgaacaaccacgttatctactggacagagtttaggatcctgaaactgctttcatctttagactgcagacatcagccaccaatactcctttggtttagattctgtgacagatgataggcagagtatggccgcgccagaaatgaggggaaaacactggcctcaacagactggcagcgagatgaaactatcggtgtcttctaaaatgggacccgtgggactgttcagcatttacagagaatgttaggaaaactttccgacatcaacatagatgacaatctgcagggaaatgctgcttggattcctccacctccacccccgacaacagccttgagattatttcaatgccttttaagctttggttgaattcatacgtgtggggcactaactgaaaagagttagttcaggtgataatcgtaccaaaattgacttcccacaaaagcaaagcttacaggaaggaaaagagcaagcatttgagaccacagtgtgaaaattcacatctcctctgctcaagtcccttaacaagctgagggtatctggacataaacccagctcagctccttttccatagggtgcaggcatgtgtgtactgcaggcagtaactaagaatgttttaggaaggttatgacttccttacagtgtagcagtttctcttccccagccaggcaaaggaacaatgagattaaatgaagtctaagaggtatgcgtttttctgtgcagagctttgagtctataaaggcagtgcttatgacccacaggttataaattatggtgactattattgctatctgtttttctttctgtctattctttcttttccatttctttcattctttttttttatttttgagacagggtctcactatgtagctctggctacagatatgtaagtcaggctggcctggaactcacagaaattccgctgcccctgactcctgcgtgctgggattaaagatgtgtgccaccacacccagcagtgtgacatttttcaaatgctaatttattccattgtaaaatgggaacttttttagaaagaaccccgtagctttcctctgtgataattatttgtagcatattctgttgtaactaacccatttcatctttaccatcttactgttctcaccagatcattttgtgtcaaatccaagatcctatcatttcatccataaatatttttgaatatttctgaagacaagaatttcatcaatgtaaccttactactattgttataccaaaataattgactgaccatcaacttatctaggtaatatcaaatatcctcaattgcctcaaaggaaagttttaaaaagtttgttagtttgggcagagcacggtggtacaaacattagggaggcagagtaggaaagaactctaaattccaggccatccaaggctacagtagtgacaccctgcatcacaaaacaaaaacaaaaaacaaagacaaagccagaaaatgcaacaaaaagcttgttagtttgaacagtggtggtgaggtgcttacattggtcggctagtctctaagctttcttttaggttgcccatcttctttcattgcccccagggactcagaggcagttggaaaaagtaactcagacatttagcattccagatttttctgcccacagattttattcttatggcaaaatatacccagtgataatgctgttcctatagacttaacaacaaaaactaccaccaaacaaaataaaactagcaaacccagcaactcaccgcattcccctgactgacttggaattctgtgtagatctgcctgggcctgaaatcacagggatgttcctgtgtctgccctcccagtgctgggagtgaaaacatgcaccaacattccctggcctcttctgccaggtatttacaagcacaggtcttggaaagcttatgctaattcttcttaagtgtttcttatatttttaaagattgattgtcattttgggtgtatttacagacacataaaattactactcagacacatcctctataattcaaatctaattttatttgtgagactacatacctttatttctttaaatttttatgttttagcattttttgttttgatggggaatggtcttctgtatatgtttatcttattggttgatgaataatacactattggctaacagggaagcaagataagcaggactaggagacaaggaggattctgggaagtggagtaggagagaagtcgccatgtgatcctaggagagggcacatgagtctggcgttcttggaaagataagaccatgtagaaatacatatattagtagttatggttaatacttaagacagagctagccaataagaaatcctagtcactggccaacagtttataattaataaagtgtcttgtgtgttatttgggagctctgaggtggctgtggaacctggcaggagcaccataacaatgttttatattgtgttgtgttttaggatgtaaatgctaaaatctcagtgatgtcatgataaggtaagaacacaaattctggcccggcattggtggcgcacgcctttaatcccagcactcggaggcagaggcaggcagacctctgtgagttcgaggccagcctggtctccagagtgagtgccaggataggctccaaagctacacagagaaaccctgtctcaaaaaaaaaaaaaaaaaaaaaaaaaaaaaaaaaaaaagaacacgaattctgggcttatagaaagattcattttcaggtaaccccaaatgaaagagaatcaggatacaaaagaaattagtctggacagtaaaggaatcatttgtatgtaagaagcaagtttagtaaaatctgaaggtagttaactacttgggcttctcatgaatgagtgtacaagctaaatcaagcttgtgtttccattcttcagtgcactctggcttctgtgatttcaattacccacattgtatagttatttgcataggtttctatacccacagaatcttcgagaatcaaatcatgttttaattatctcaaaagaaccctggtgcattattgaaaatgccaactaactgaaatctattgtgtttgtaatgcaggcaggtgtgcaaaggagtggtacgaaacttaaatttagttggatataaatattgttcaaatgaccaatatttttgtataaaaagtaccattcacctagaacaaatgggaagggctagtttgataggtcaaaacattgaacttcattttttttttcaagatggggtgtggtagtttgaatgtaattggcccccataagcgcattgggagtggcactagtaggagccatggctttcttggagtaggtgtagccttgttagaagaagtgtgtcactgtggaggtgggctttgaggtctcatacaagcttgagccatgctcagtgtctcacttcacttcctgctgcctttgggtcaagatgtttcaattctcagctctttctccagcaccatgtctgcctgcacgccgccaccatgtccttccatgaagataatggactaaacctctgaactgccagccacccaattaaatgttttcctttataagagttgccatggttatagtgtctcttcacagcaatggaaaccctagctaagacacaggatttctttgtctaatagccctggttctaatggaatttcttctgtaaaccaggatggccttgaactcagatatctgcctgcctctgcctcctgagtgctgggtttaaaggcgtgtgccagcactataatttttaatagttctaatttcctaatcattttatatgtacttggtaagcagctggtattttatataacgctgactgttgtttcattttcttatactttctgattcactacattaggcatatatctcctatatgtgcaaataaatatatttggcattcaatagttttaaaaccttaatcctggatagaatatagattctaaatcaagttatttagatgcttactgtaaagatatatcatttgttgaactcaagtttagactctgatgttttcttgggaactagttcagtttccaaggctagactctcgggaggagttgagtcattgtgtgaaatctgtatgtttttttctagctctcctgctcttcaatctctctgtgatttgaggcaagcaacttaacctctctgagcatctatttccctggcgatataatggtgatagtttacattttgtgggtcaccatggggatcgcttgtaataacacaggccatgctcactttggtgccatgtacaaatgctctgtaaatgaaagcagtcaattcataattataattacgatgtgggcctcactgttggtagaggcttgcctgatgctctcccagtcagtcttcacatgttgacttactttacctactgccacatgtggctggaggaaagggcaagctgttcctgccagagattccactgaaatgacaaaccatgaaccctattcatttccagcatcaacaagacccaagagatccatctctgttgacacagacacctagcctcaccttgcactgaagccccacagaacagcaaacaaccacactatgcctgaagtttaacttagcacacgtgggacaccctcctccactgtgaatcactggcttcctttctgtataacgtcattttcactgatgtggagggtcatttccaattcatttctccccagaagatattgactgagcaactactttgtgctaggcactgtgccaggaggagcaagggacacaatgaggagaaaggcaaagaaagccctcatttctggggctccaagtccagccctggacccagtgtcagaagtggacagctataaagtcaactgataaatgtcatgctgtgcaaaaccatggtggagtcttttgcttgtttagaattttttttaatttttagtgtgtgcatgcatgtcgacatatggatatgtgcacaaactcgtggtgttttgagagcatatatggaaggatttcttgacggaggagacacttacacacagtcctaaaggttggggaggagctaccaggccaaagagagggtagggtctgtgagcagatgtgggaccagacagcttacctgttatgacactacattttttgcaaggatgtgtgaatatttctcacagacactaagtaagttccagaaagaaagctttatggttttatttatgtcatgaccaagaaagccacctggaagtgcaaggggggctcaggagaagggagctaaggtggcctgtagaatttttagggttgtgggtggagctgcctactcttgtgagaatcacagattagtctttattggcaaccaaagaggtgtaaatggagaagtcacagacacatctgaggtatgggacagggtgacaggggagtggaggaaaggaaaagggaggggagggggatgaaaaggaggatagtagatgagagaaaggaaagattctgctttaccatgtaccaggtgcaggagcatggatgctggagccatagaaggtaggaccaggttatcactcactgtccagggtttgcctagcacgcatgccaacaagatagttggtcactctatgagctatctcctttcataaacctaactctggaagacattagaacaccccttagcaagctagaggagaactgaggagcagaaacagaagtcctgcacctcagggcaggtatggctgctagctaaagggcaaagtcttgggtgaccccaggagctgacattttaaatttactgacttgaggttgcatcctattacatgaactctccagaggactgtttttggcataaaacatacgcctcagcctgaattctgacatgatggttaatagcagttgttaactcaaaggcaaactatttgcactccttcactgatgttatgtaacagccccctcccccaactttgcacagctgactccaagatagaagtatcatttaggccacaaaacagcacatagacagcaccaccttccaaaatgaaaacaaagccctgatccatcaaagtatgagacagacatttttgaatttcccagaccctatcatgtaaacatatccaacaaatcccctttagttacttggaaatctgcattctacacccaaagatcttatcctttttttgagtgacaagggaagcaggagggatggcaggtgtcctgctgcagagattaaggcacagggagagctacagagttgcctcctgcttacactcagctgcccccctctctgcaggtctctgccctccccgggaaatgtcatctcggctattggtgttttagtgcctgacacagagcacgtcacacagcaggtgcttcacacccacctgtgatccatgacctgacgaatagttgtgtttttgttgttgatgtttctgttttgggagtttggaaaagtgaagagcacgaaatgagcaaataatgggcacgtgatgagcacaagatcagcacctgatgagctcgtgatcagcacctggtgagcacgtgatcagcacctggtgagcacgtgatcagcacctggtgagcacgtgaccagcacctggtgagcacgtgatcagcacctggtgagcacgtgatcagcacctggtgagcatgtgatcagcacctggtgagcacatgatcagcacctggtgagcacgtgatcagcacctggtgaccacgtgatcagcacctggtgaccacgtgatcagcacctggtgaccacgtgatcagcacccagtgaccacgtgatcagaacccggtgaccacatgatcagcacctggtgaccacgtgatcagcacctggtgagcacgtgatcaactcctgatgagcacgtgatcagcacctggtgagcacgtgatcagcaccctgtgagcacgtgattagcaactgcagagcacgtgatcagcatctggtgagcacgtgatcagctcctgatgaccatgtgatcagcacctggggagcacgtgatcagcacccggtgaccacgtgatcagcacccggtgaccacatgatcagcacctggtgaccacgtgatcagcacctggtgagcacgtgatcaactcctgatgagcacgtgatcagcacctggtgagcacgtgatcagcaccctgtgagcacgtgattagcaactgcagagcacgtgatcagcatctggtgagcacgtgatcaactcctgatgagcacgtgatcagcacctggtgagcacgtgatcagcacctggtgagcacgtgatcagctcctgatgagcacgtgatcagcacctggtgagcacgtgatcagcacctggtgagcacgtgatcagcacctggtgagcacgtgatcagctcctggtgaccacgtgatcagcacccggtgaccacgtgatcagcacccggtgaccacgtgatcagcacctggtgaccacgtgatcagcacctggtgagcacgtgatcagcacctggtgagcacgtgatcagcacctggtgagcacgtgatcagctcctggtgagcacgtgatcagcacctggtgagcacgtgatcagcacctggtgagcacgtgatcagcacctggtgagcacgtgatcagcacctggtgagcacgtgatcagcacctggtgagcacgtgatcagcacctggtgagcacgtgatcagcacctggtgagcacgtgatcagcacctggtgagcacgtgatcagcacctggtgagcacgtgatcaggacctggtgaccacgtgatcagctcctggtgaccacgtgatcagctcctggtgaccacgtgatcagcacccggtgaccacgtgatcagcacccggtgaccacgtgatcagcacccggtgaccacgtgatcagcacctggtgaccacgtgatcagcacctggtgagcacgtgatcaactcctgatgagcacgtgatcagcacctggtgagcacgtgatcagcaccctgtgagcacgtgattagcaactgcagagcacgtgatcagcatctggtgagcacgtgatcagctcctgatgaccatgtgatcagcacctggggagcacgtgatcagcaaccgatgtgcacgtgatcagcacgtgatcagcacccggtgagcacgtgatcagcaccggtgagcacgtgatcagcacctagtgagcacgtgatcagctcctgatgagcatggatcaactcctgatgagcacgtgatcagcacctggtgagcacgtgatcagcaccctgtgagcacgtgattagcaactgcagagcacgtgatcagcatctggtgagcacgtgatcaactcctgatgagcacgtgatcagcacatggtgagcacgtgatcagcacctggtgagcacgtgatcagctcctgatgagcacgtgatcagcacctggtgagcacgtgatcagcacctggtgagcacgtgatcagcacctggtgagcacgtgatcagctcccggtgaccacgtgatcagcacccggtgaccacgtgatcagcacccggtgaccacgtgatcagcacccggtgaccacgtgatcagcacctggtgagcacgtgatcagctcctgatgagcacgtgatcagcacctggtgagcacgtgatcagcacctggtgagcacgtgatcagctcctggtgagcacgtgatcagcacctggtgagcacgtgatcagcacctggtgagcacgtgatcagcacctggtgagcacgtgatcagcacctggtgagcacgtgatcagcacctggtgagcacgtgatcagcacctggtgagcacgtgatcagcacctggtgagcacgtgatcagcacctggtgagcacgtgatcagcacctggtgagcacgtgatcagcacctggtgagcacgtgatcagctcctggtgaccacgtgatcagctcccggtgaccacgtgatcagcacccggtgaccacgtgatcagcacccggtgaccacgtgatcagcacccggtgaccacgtgatcagcacctggtgaccacgtgatcagcacctggtgagcacgtgatcaactcctgatgagcacgtgatcagcacctggtgagcacgtgatcagcaccctgtgagcacgtgattagcaactgcagagcacgtgatcagcatctggtgagcacgtgatcagctcctgatgaccatgtgatcagcacctggggagcacgtgatcagcaaccgatgtgcacgtgatcagcacgtgatcagcacccggtgagcacgtgatcagcaccggtgagcacgtgatcagcacctagtgagcacgtgatcagctcctgatgagcatggatcaactcctgatgagcacgtgatcggcacctggtgagcacgtgatcagctcctgattagcacgtgatcagctcctggtgagcacgtgatcagcatctggtgagcacgtgatcagcacctggtgagcacgtgatcagcacctggtgagcacgtgatcagcacctggtgagcacgtgatcagcacctggtgagcacgtgatcagcacctggtgagcacgtgatcggcacctggtgagcacgtgatcggctcctgattagcacgtgatcagctcctggtgagcacgtgttcagcacctggtgagcacgtgatcagcacctggtgagcacgtgatcagcacctggtgagcacgtgatcagcacctggtgagcacgtgatcagctcctggtgagcacgtgatcagctcctggtgagcacgtgatcagctcctggtgagcacgtgatcagcacctggtgagcacgtgatcagcacctggtgagcacgtgatcagctcctggtgagtacgtgatcagcacctggtgagcacgtgatcgccacttgatgagcacgtgatcagcacccggggagaacgtgatcagcacctggtgagcacgtgatcagcaaccgatgtgcacgtgatcagcacgtgatcagcacctggtgagcacgtgatcagctcctggtgagtacgtgatcagcacctggtgagcacgtgatcgccacttgatgagcacgtgatcagctcctggtgagcacgtgatcagcacctggtgagcacgtgatcagctcctgatgagcacgtgatcagcacctggtgagcacgtgatcagcacccggggagcacgtgatcagcacctggtgagcacgtgatcagcacctggtgagcacgtgatcagcacctggtgagcacgtgatcagcacctggtgagcacgtgatcagcacctggtgagcacgtgatcagcacctggtgagcacgtgatcagcacctggtgagcacgtgatcagcacctggtgagcacgtgatcagcacctggtgagcacgtgatcagcacctggtgagtacgtgatcagcacctggtgagcacgtgatcagcacctggtgagcacgtgatcagctcctggtgaccacgtgatcagcacctggtgaccacatgatcagcacccggtgaccacatgatcagcacctggtgaccacgtgatcagcacctggtgagcacgtgatcaactcctgatgagcacgtgatcagcacctggtgagcacgtgatcagcaccctgtgagcacgtgattagcaactgcagagcacgtgatcagcatctggtgagcacgtgatcagctcctgatgaccatgtgatcagcacctggggagcacgtgatcagcaaccgatgtgcacgtgatcagcacgtgatcagcacccggtgagcacgtgatcagcaccggtgagcacgtgatcagcacctagtgagcacgtgatcagcacctagtgagcacgtgatcagctcctgatgagcacgtgatcaactcctgatgagcacgtgatcagctcctggtgagcacgggatcagcatctggtgagcacgggatcagcacctggtgagcacgtgatcagcacctggtgagcacgtgatcagcacctggtgagcacgtgatcagcacctggtgagcacgtgatcagctcctggtgagcacgtgatcagcacctggtgagcacgtgatcagcatctggtgagcacgtgatcagcacctggtgagcacgtgatcagcacctggtgagcacgtgatcagctcctggtgagtacgtgatcagcacctggtgagcacgtgatcgccacttgatgagcacgtgatcagcacccggggagaacgtgatcagcacctggtgagcacgtgatcagcaaccgatgtgcacgtgatcagcacgtgatcagcacctggtgagcacgtgatcagttcctggtgagtacgtgatcagcacctggtgagcacgtgatcgccacttgatgagcacgtgatcagctcctggtgagcacgtgatcagcacctggtgagcacgtgatcagctcctgatgagcacgtgatcagcacctggtgagcacgtgatcagcacccggggagaacgtgatcagcacctggtgagctcgtgatcagcaaccgatgtgcacgtgatcagcacgtgatcagcacctggtgagcacgtgatcagcacctggtgagcacgtgatcagcacctgacgagcacctgattagcagttgatgagcatgtgatgaattcgtgatgagcaggtgatgaactcatggtgagattcagtcacagtgtagcatcacagcaagaaaaagcagcgatgggttgaggaccgttgcaactcaggagggagctgggagttgtgtgtgtctggaaaagtggggaggctgagaaagatgaggaagattagcaccaatgagggctaagtaaggaccattgacttctcccctggacattggacagttatgaagaaagcattgctaaaatctgttaaatagggctggagagaaatggctggagagaggatgtgtctatgcttgcagagagcctgcgtttggttcccagcatccactgctcatagctcacacctgcctctatagttcctggggatccagtgtcctcctctggcctcttcagtcaacagccgattgaactactcttacaccaggagcagctgtatggactataccacagatgttttgagataactatgccaaaactacaggtagctgattgccctggtccctggagacacagcatcagccagggctgtttgaaatcggatctttgtccatcacaagcctcagggaaccatttttacctttgccagaggggggtgcttcttgtggtctagtgaaggattgttgtgtctgttgcccagacaaggccactattggtccaaaatgttaagagtcattgactctgattggttctaagaggcaaggtaattggttcagacagttggctgtgacgggtctatacagcccttctgtggctgtaaatgcaaattgctcagaagtgaggaggtaggaaaactgtcctgtgctgcctgccttccctggtggtagaacacgagctttattttatcttgtcttgtggactgagctgggagcaggaagaagcatgagagacagcagagtggcgggaatagaaggggcaatgacaggtatagccgaatgtcagaggcaggtatagctaagcaataatcagtagtcaagattgtgaaagcagcaaggcatcggcttttctcagctgaactgttctggagtggttagctaggaagaagagggaggggtgaaggagagaggtgacaagggaggctggagagctagggatgaaggaaaaagtctgttgggagtctgaggagagcacccgtaaagtcctcagggtcaaaggtctcagtccggagcccatgagctgacgcctaagtttgaatatcactaccggtggcctgtaccaggactgtaacactagagggcgccatttccactgcttcctcctgctaatgcccctgactgcatctgaacactgagatgagagcctcctgcatttgaggagcttcttgcctaacaggactccaagacagctgattagagacaaggtaattggtccagacagttggctgtgactggtctgggctcagaaggtcacataaaatgcaggctgcatttgctgcagcggtttgtatgaaaagagatcttagatccagagggaagatagtcgtgacataaggggcgtattcatttcataaatatgcccatacaaatcaccagaaactgggcagcttcaaacaattatctcaaatccaagatgttgttagccccatgcgttctccgaaggctgcagggaaggatctatcgcacgtctcttggtttctggtgttgcttgtcaggctgggcaggcttccaccactccatgtgttgatctctctacccgaaagctgctccatggcaatctccaggtatcatggcagctttgctctggtctctgcctccatcaagtagtcttccctgtaggcatgtctgtgtctcttttcttcttccagcattaggcacagcagatgaagggcatatacttacctgactatatccacaatgactgtttacaaataaagtcccattctggggtttctaggatggactaggatttgtatgagcagggccgctgttcaagctgctacatgagggaaataactaaggacaagggagattacagaccgaagaagctgcaatggaagacagggttaaaggcagtttttgtttgtttttccaacatggaagaggtttgaacatacttcagtgttgaatacattaaagagccctagggatggggctctgccaaagagtccaggcagaaagggagtcattgatggtgccagcttccaagggactggggtagaagtgcaggtgggtgggccaatcgtgggcttggaggtggggggggcagaggggtgtgtaggtgcagatgtgcctggagagatggctcagtggttaagcatgtgtactgctcttgcagaagcatgggttaggtttcagcacccatgctgggtgtcttacaaccacttgtaactccagctccaagggatctgacaacctttttattttattttattttttgcctctacaaagggctgcacccaagttcacaattaaacacagacacagacatatacgcaaaattaaaagctaaaaaaaaaaaaaagaaaaatcaaggcatggtggcatgcacctttaatcccagcactcaggaggcagaggtatgtaaacctcttgagttccaaaactacatagtgagacccagtctccagcaaaccaaaaccaaaaccaaagcccaaacaaaacaagacaggagaaaagttaaaaaggaagaaagaagtatgcatggatggacaaaattgctcccagaaactatgttattaaaagaaaatcccaatgttaggggtgggctagtctgctacaggttttggccagggaggcccccccaaacaatacagccatctgccattgctagtgattgctgtcttagggtttcatttgctgggaagagacaccatgaccacagcaactttttatttttttcgccttggggtcgttccctgggaagacaatgaccccgagtttccaaagcaggcagttttattttttaagatttatttatttatttatttatttatttatttatttatttatttatttatcatgtatgcagtgcatgccagaagaggacaccagatcacattacagatggttgtgagccaccatgtggttgctgggaattgaactcagaacctctggaagaacagtcagtgctcttaacccctgagccatatctccagcccccacagcaacttttataaaggaaaaacatttaattgggttggcttacatttttagaggtgtagtccattatcatcatggcaggacatggcagcatgcaggcagacattgtgctggagaaggagcttagagtcctacatcttgacccacaggcaacaggaagtagactgtctcactggaagtagcttgagcatatatgagacctcaaaggccaccttcacagtgatatacttcctccaacaaggccatacttacaccaacaaagctacacctcctgagagtttgccactccctgtgaacttacggaggccagttacattcaaactacaattgcccaccagaactggatagtaagaatctgttgttgaagaaatcacttacttcagttgcaagatacagagaaatcaagtaggaactggtctggaaagcttctacccttctaactagctctcacactgctgggaaaggtgcaatgcaagttgctgctgaagagttttcatcaataatctgactcagctaaggactctactaactggccagacagtatgaacctactgatgcaatagtggcacatctgttataagggtaaccaaccactttcacattggatttgaggcctgctccacaggaggacattgcttttttatactgtaaacctggtcaacagaccatggctagggaggtcataggctctagtggggaagctaccgctattttgctaaatggacatgatgtcttcataaatttcccttgtaaataagcacatttgtaccatacgttagtgttgttgtagacttttgtcaaagattctccttgtatcggacaatgctactatggagacttataactgattaaagtaatgacatcatctttatcatcctttcaataggggaacattgtagaagaaatggcagaaggaatgtaagcactagaagatgggcaaggagtgatatgggatgcttacttctggacatgctatggctgatgcactcttgaactcatagcatctgttgtagatgggtgagaatggctcccataaggttcatataattgatggtactgtttgggaaggattaggaggtgtgtcttgttggaggagatgtgccactggggatgggctttgaggtttcaaagcctacaccattcccagttagctctctctctgcctagtacttgtggatcaggtctgaactctcagctactgtaccagtgacatgcctgcctgcctgctgccatgctccctccaccaaaatgactgtggactccagccccctggaactgtgaaccctaacaaacgctttccctctataagctgccttggtcatggtgtctgcacagcaatagaaaagtaactaagacagcctctatgattacctgcacaagatctgccaacaccctgtcttggaggagggaagggctcaggaggccccactatccctgaggatttatatgtagctaatgattagtggaaagaaagagaccttttcttctgtgttgtggccactggtaaggtacctatgcttctgcaaacaacttctcattggttcttataagcaaccctagtgaaacccatcgagtccttaaaaaatgacataaaagtagaacagagactagttgagaagagcacagtgggggctggagagggacaagagagagtagcaggagatgaatatgacaaaatgcatgacatacatatataaaatgtaatgaaacctaatactatgtatgtaattaatacataccaacaaggtgtttttaaaaagggagacaatgacacaccgagaaagaatgctgcagataaatgttttagcaagaaggaccctgaggttagttgctcacactaacaaatggccactgagggcagtcatgtggcaggcagggcctgagtccttagcaggcacctgtgacggccccactagtggtgggctaggatgccatgctgtgggaggggaccagctccatgtgtggagctctggggctggagggtcaggggacactggttagagctaagggagaggccaaggctgatgatgtgacccagagacccccgggaggggaggcagagtgagaggatgcacggaggagttttaagagattaccagacagggtttaaaggtaaggagggggcagcccagggcctttaccacctggggttggctaaggactgaagaaatggttttccatttcactgccctaagactgggaggggcctaggggagaagggaggagagggaaaagtaggagtgactagagatggagccccacagttgtctgaaaaccaactaggaaggggaggaaagggtgggggatcttgggagaggacagctggaggagggtgataatgcaatccctttgctgtctggggtggagaaagagattacagttgtatctttgttttttctgtgtttcaggctttcatctctgaaacagtgaagtgatccgtgttacaggcttctggggactaaatgggaaagcatgcctagtgatgctagtccagtgcctggcacacctagtggctgctaattatcctaatgtttcgttactgcaaatctgtgatgaactcatccagaacccctaagccaaggaaggcatcatttacgtgttgtctcctcttggtatcttgtattgaacattgtaagtaaagagttctttttgtgaaaagaaacccatctaacatatttgaaagatagacccagtaacgtgcttgaggatgcattctttttatctgtcatgcacatacgaacagcatacatttcaattaaggattgctaagtgagccaagctccctcctcgtgggctggggctctgatttattgcccacatctgtgtagaaggattaagagcagcatgctcgctgataagtgattgagctatgtgttccccattttgttaagaaaccgcctcttgtctgagatggagataaatccgtatttttaaaaattacccttctgtgggccaaagtgtttttaagcagcaatatgttgtagaaagactccccggaggagtctgatctggttcttttggtaagaacctcatggaaaaaaaaatccaaaaggaggagagaaggtggggtgctgagtaaggtggggagagaaggggagagaagaaaggggaagaaagaacgggagagaagaggagaaggaaaaggctgagggacagcatctttttcttctcaaagaagatgcccacacagcagaaaggacccagtcacagccctaagagggacccagcacctgagtcagacttattcccaggcctgaggccagaagcagctgacttcagtatgagggccagatggatacagacagcttctgagttagcaaaccacagcagtgagccactcaatcctagaaacttgatgctgagtgcaacggaaagagggaaacatgctaagtggtgccagaaacagtgctcacctgagatgggtcctgattccacttgagctttgtttgagggctgcactccaggttgttttttataattgcttcaccccatgcaatttttcattttcagccttcacaaactgagatgttgtgttttattatttatttatttaaatctatgctcagcctaagctccagatgtttacctctcattctgagggtgaactccaggtatcaggattcggagagtccccctagatggtctagcccgctgccaagtcagaggtcattcctctggagtaggacttgataaccttgtgcaaatgaatcagttggatcttgtttaaatgtataggcagggctggagagatggctcaacagttaagagcactgggtactcttcggaggacctgggcttggtttccagcacccacatggtgactcccaactatcggtaactctagttccagaggatctgacaccctcttctggcctctgggagcactgtacaatgtgcacagacatacatggatatataaaaataaaaaaataaaattaaaaaataaaaaagcatatggagtgagtctggatgggacctgggcagctgtgctttttaacaaacctctggaatatgctactgtgtctggacttccagcctcatttagagacattgacatgcagggaacaggatctcaggggtcagtaatcctgtctccctggtcaaggtttttctggctgccattttgctcagtttgctacatttgctgtttgctccagcatgtatcctgtttcagagattctgagaggggtagaatgggcaatgcaggacagtttcctaaagtgtgtgtacatatcccatatgaatatacatttagaaaatttattagtagctgtgagtttattgtcgtgagtatttagaacaatgatgctggcttccagtatgtagtgttgtagtgtcagctcttttaggaatgtgtgcgtgcgtgtgtgtgtgtgtgtgtgtgtgtgtgtgtgtgtgtgtgtgtgtgtgtgcgcgcgcgtgcacgtgtgtttgagtgcaagtgtgcacatgtcatagggtgcacgaagaggtcaggggacaacttttgcatcacaatctataattcgcttctcagctcactgtagcgatatattatttatgatatattaaagtttgtctggagattcagaaaagcaaaatcagccacaagccttagaagccaggcgcacacctttaatcccagcagccagaagctaggaggtggtggtacacacctttaattctaggacttgggattaagagatagacggatctttgtgagtccaaggccacccagatctacacaagatagaatcagtctaaaagagaattatggctcacatctttaatcccaggactcattcatgtaagtcagtattagattcaataggggcattcattctccagtcacactgaggagaggttacagtctgaggtttggtgagagctcatggagacaggatcagcccacagcttcaggtaagaaggtagaggccagctgctttgcttttctgatattcagcttgaagtttgaatcctaacatcaggctatgggtccttgtatttgtcgtgttacagctcactgagcttattctctgccacagggcatcctagcatgccaaccacacatgactattttgctatttcctctgtttctttgtttccccttgtgaggtggacaggccttctgtgccacatgcttccaccatggtggactgacctgccactggaccaaagcaacaaggccaagagaacatgagctgaaacttctagagctgtgagctaaaataaacatgcccttgtgttggttactttagccatctagtcacagtggcagagagctggctgacgtaggttgtctagcagagagctcaggagaagagtgtagggctactaatggtgaagtgagattctgaagtctaagacctgagtttcatgacatttctttgctcagtcagaacttatggccttattagaagataatgactgcattaaaatgaataataaaaccaattttatttgaacttagcaagaatgccagttctcttagatttgagccgtacaaaagtctcctcccagggaaaataaagccagtatggaatttcaacaaggaacctattgaaggaaagatttaaatttccacctttcacacatatagcaaaggactaggacttctgttgttacttatccaggaattgaaaggtgtcggtgattacttgagccttcccactttggatggcttagaagcaggtcttaaggaactgcaggaagtttaaaggagtggtgccctgagcaagtctgccattggcggagagggtggaggtgtttagcgctaaccacagagggtccaaagagaagatggggaggccagaggcagtgctggcccctttgggagggattctgccggtaatgtgtgtgatgctaaggggaaattttctttctgctatgttcccttgtaataggaagacttcaaaaagaagctagttatgaattaaaagattcagctcctgaagtctgggtttgtttttgagttttgtgggagccttattacaaagaagaaatacttcatttcttactccagatgtaaggattccctaggttatcatttcagatgccaggaatcttgaaagggaacaaaattacttttctcaacatggagtttctcccccattgtttagtagagcctgacctaatagttcctcctcaatatatgcgagaacctgtgtcctttcaagtgatgacaacctaatcatacagcctccctgtcaacgtcacactttctgcagatactggggagtagggggataacaccaactgttttttctttggggacatacaactctgttgcacttcttggctcctacattaggtggcgctatttgaccattttctccacaggctcctcggtgtgcattctgaggaatggtctgatactgacagaattcactttttcacatgatactctttttttttgcattgagtacagacagccagtgctctttctgggttgcaagcctcagacacctcttagatctaacacaaataaagacttctggatgatgtagggctgcttgtggcattgttggtctgtttgaagttggtgttgggtctgaggatgccaggtggcagcggcagcctttacaagtataaatggggagtaaaggggtggaatggtgttgtggatatttgtgcactgtgtgaaaatgtattgccataatggtgtaataaaaagctgactagccgatagctaggcaggaggtatagtacagcgggacttccaagcacagagagagcaagtagggggtgataatcaaggcacagggagatgccaacaagacatggagggagttggacatacagaatgagaggaatgttaaaagccaccattagatgattataagtgggtaaatttaagttataagagctagtagtatgtgcctaagctaaggccaagctttcatagttattaagtgtctatgtagttatttgggagctggccggtgggacagagaatgactcgctgtatacagcgtgaggagatttacaaatcacacaaggtggactgatcatttatgtataacataagcctggatttgtaaaggaaagaagaaaaaggagaatttgccttgagttatcaggagagatcattgtgggctatttcatgcacaacagccataaactgtgtgtgtgtgtgtgtgtgtgtgtgtgtgtgtgtgtgtgtgtgtgtgtgtgtctgtgtgtgtgtgtgtgtgtgtgtgtctgtgtgtgtgtgtgtgtgtgtgtgtgtgtgtgtgtgtgtctgtgtgtgtgtctgtgtctgtgtgtgtgtgtgtgtctgtgtgtgtgtgtgtctgtgtgtgtgtgtgtgtgtatgagtatgtgtgtgtgcatgcacagtcccatgtagttgtttggtttttttcttttacagtcagcaaatcaatttatttcttattctcatgatcttctttctaaagtcaccagtctcttggaaggcttttttttaaaaaaaaatatttatttatttatttatttattctaaccatatttgattctagaatactaaaggacagttgaacttcaggaccctggttctgggtgggtgtggtagtttgaatgtaattgactcccataatctcatagggggtggcaccattaggaggtgggctttactggagcctatgggaccttgttggaggaagtgtgtcactgtggggatgggctttggggtttcctatgctcaagatactgttgagtgtctcagttgacttcctgttgcctgcaagatgtaggactcttagtgaacacctgtctatatgctgccatgctcctgctatgatgataatggactgaacttctgaaactgtaagagagttaccccaattaaatgttttctttattagagttgccatggtcatgatgtgtctttacagcaataaaaaccctaactaagacagtggggttggcaacaagactatggtacctctcaggagctccctgcttagggaagggttgtcactcttgaaattgtgactcctgtcaggcatggtgacacatatctgcagttccagcccttgggaggctaaagcagaattgatagcctaagctatagtgacaccctgtctctaaatagcataacacaaaattaaactcaagtgtgactctttttaattttgaactgcctatttcgaagaagtagatgatattgggcttgtcattactgtctttcatagaggagtgagctgaggggacaatggaactgacaaacttgctccccccaacccctggtgccaggggccaccatcctgtgacactagtgagaggatgtgctgacctggcacctcaggataaagatgcaatatattttgtgtggagtgatctggaagtgaccccatgtgtttgtttcctccccatcatacatttggtgaaatgaattaagacttttaagtcaggagatttagcaattagaggtttttttttttcccccagagaagaggatgatattcgcagctgtttgagggaatgataggaaaaagtcttgctaaattggaggatgatggaatattgctctccctgcacacttccattcctcagcaagccatctgtgggttgtatagagaactgagcgaccattaggactctttcttgcttacagggagacctgctggttcagatgttagccattaggactaatgggtgtgggatttttcgagaagcagctctggggaggaaggcctccggatccgtgccttctgtccctgaatagttttctctggaaaaccagattttggcggaaggtttgttagcggtggacttggtgcagctgaaatcctttgggagctaatgggagataccggggtaggtgcggatatgccgtgcgcttcaacactgtcgagaggctgtggacttcatgagaataagccgagacaaacaacattcctcacatgggttgagaatattaccttctcttgttagatagccgagccccggcacagccacacattttctccgctggtgacggatttctctggttgtgtgtgtaatatccaaatcattagacaagtctttggctcaggaacagataccaaatactaaattgagccaatcactagtcctttccaaggtaaggcctcacctctgctttccctccagactgacattttaaaatttttgaataaatatcccgttggctctccagatgggcttcagggaatgacacagcatgtttagacaacgacacagtttgacttgtagttcctgagcaaattatgtacaggttttcagttctctggatccctcctgcccctgggacatcacgtaaaacagctgaatgccattatagtaaagggtttgtatattggtttcgtagcctgtaattttactgaattatttgatcagttctaacagtgtgtgtgtgtgtgtgtgtgtgtgtgtgtgtgtgtgtgtgtgtgcgcgcgcgcgcgtgcatacgcagtttcttttgtgtttcctatgtttaacaaaaccatgccaccactggggctagagagatggcccagagagcactggttgctcttacagagaatcccagttcaatttccagcacccatatgatactttgcaaccctctttaatgctagtccttgaggatctgatgtcctcttctggcttcctacggtactgcacaaacgtggcacacagacatccaagcaaggaaaacacccataaaaagtcatgagacaattccactttccctgtgaggattcccttccctccctccctccctccctccctccctccctttcttttttccttccttcctcccccaacccttttctctagttgctctggtgaggccttccagtattctgttgaataaaaatggcaagagcaggcatacctgtcttaatcaaatgaaggaaaactcccagttcttcatcattgaatatgatgtttcctaggtgtttttaaacatctttttttgttgaggtacatttcttttatgcttaatctgttgagagttttcatcacaaagggatactaaatgctctttctgcatgtgtcaaagtgatcatatgtttttcatctctcattttgttagtgtggtgtatccagtttgttggtttgtatatgttgagccatccttgcatcccgcttgattgtaatgattcttttcacatgctgttaaactttgatttttgagtatttggtaaagatctttttcatctgtgtttatctgtaatactgtcccgtcattttcatttcttgttgagtgtcctcatttggctttggtgtcaggataatgctgaccattttttagaagtttgagaaatattattttaacgatggtagaatttaaccctggaactatccggtcctggtcttttcttagatgtgtgtggggggacgttctgttactgaaccaatctcctcacctattattggtctgttcaagcatgttatttcttaacgaggaagtattagtcttctttttttttaagattaaaaaatttatgtgtatgggtgttttgcctgcacatctacatatgtgtaccacatgcatacagtactccaggagaccagaaaaggcatggatcctttggagctgctgttacagatggtgtgagccgccacgtgggtgatagaaatcaaaccctggtcctctggaagggtcattagtgctcttaactgctgagtcatcgctccagtccccttggtaggttttatgtgtataggaatgtatcatctcttttttatttttaaagtgtgtgtgtgtgtgtgtttgtgtgtgcgtgtgtgtgctttatgtgtctgataaatatctaggataacaaactaaaccaggctacagagtcacctagaaattaggtagtgttgtgaatgttgcatcttcccagtgcctcttcctgggctatttttcctcttcccagcaaggcaccacaattttgatacaaatactccttacattaaggcaaccatggcaaccacagtcttgatacactctctgtgactgtggcccacactgcacaggtgcttgagaagccctatggtgtattcctttgtgtgttcctccatttttacataaatggtctcacattgccacttttagaaaccaggaaggcattttctgttcttttggaaaatgaaaggaaccagggccatggaataatgagcattaactagggtttgtttgattgaagacaacagaaagtaattctgctggtttaagggagagggagtaagtggaacatacctaagtacttcatgactggaaaggcagctgagggctgctctgtgaacatgagcaacgggtagctgaggtttcattctcttgtcctcatcgctggcatgaaaaaaccacaatggccccagcttctgcatgcctggatcccagtcttcaaattcctgagacagtgagaaaatccagttaaaccaggaattcttccctgagttacccccttatgtatggtcaggaatcagtaatgccagtagtcagagcctgaattggggatattgcaggggagggtctatgagctgggtgcctgagcaggtgatgactatatgggaatagaaaagaattagaaatgagaaggaaaatgcaatttctttaaaaaataaagaacaaaggggaaagtgttacaatttgggagttcctacctggcatttcaatgtatttggacttctaaattttgagaaaaatagggggctggagagatggctcagaggttaacagcactgactgctcttccagaggttctgagttcaattcccaggaaccacatggtggctcacaaccatctataatgagatctggtgccctcttccagcctgcaggtatacatgtaggcagaacattgtatacataataaataaaaacaaccttaaaattttttttgagaaaaatcagttgagacaaagaaaaatgtagaaaggacatatgataggtagaattttagttgggggggggctagaggcggaagccagggagaagggaactgggatcgtcatgtaattcaatcttgtttgtaattcaaatatataaaaaataaaaaactaaaaaagaaaaacgattccttatttattaatatgatcccttactgtttgtgagaattaagaaacactcaatttggagacatccattgactcagcatcactgacaggtggagggtaaggtccacttctgcattgctgggaaccaggatgggtacagaagtgtaatcaggtcctgaggtcagaattagggtttattccagcccactggggacatgggaggaggagtgactgactgcagtcacaaagctagcctgattctttccccaagcaaaccagatacatttaggctaaacaaagtgcagctggtatcttctgccttggggtgcctagcaaagcttataggagataccctgggtatgagctagctcagataggggttaggttgtggttggggtggggaggaaggaaactgatttcacagatagaccctaaatacatacatacatgtttgagattttagattcttttctgccatcctactctctctgctcccctggcttcagggaagcccagatgtatttggcacacagtagttatatattcctattgagtcactgtccacttctgtgcacacagggaatgctaaaaacatgctgctgacgcattgacgctgagagcagagaaatgccaaaagtacaggacaagaggaggcagaaaagtgagtggaaaatgtcacagggcagtcctccaaggaagttcacgttcctttcctagcctgcctgaacacttactggtgggggaacattaagtatatttttcaagcaacactgaaaataccagttcccactaaacctctttttccccaacaagtgtgtagcttagggagatcccaatggaacacacatcttcctcaagtcctttgtgaagagttcacacccagtgtgagtactaagaaataaaaaggtgagcttcacacatgtaccttaaaatgttggggcacctgtctccgtgtccttattttcccagtttcatgtcttcatccacaatggcccctgaggtcttgaacaagccagtcagactcagatgatcagtttctgagttgttcaagtacacacaatgcttcctacctcttaggttgctggtcttattcaaataacctccacagtgcctggcttgctgttcctactattacaaattaagtctgattactattgtgatcattatcattactcagttattattactaaattaatggtaattaacagaccttttccattgccggaagaatggttcttactctttgtatcaaagagtacttgagtggttatcagtttaactgtttagcctggtatcaagtacaataacataaattagagaattagtgctaatgatgaaaaagcattttgactggcccatttgtggtctgtaaataaatatacatagtattaaaagaaattcatggtgttagcaagatggttcagcaggtagagatgcttgctgctaagcctggacaccaaagttgatctcagaacacactaggtggaggaagtgactagatcccatcaagttgtcctctgattaccacatgtgtgctgtgacaacacgtgcacaacacagtaaatgaacatgtattaaatttttaaggagacccagtctctagcagttcatttggggagatagccacagatacaagggatattgaagtgctttcataagagcccagcacaagaagccaatgaggaaaattaacgaaggtatgatttcctactcctgtctgcacttggccaaacgtgaaaagtgtttagtgttaattaacaaaatttcgaaaattatggactttggaaagcaaatggtttcattttaattcaattattcttgaagagacaagactttcatcttcccaaggacaaagattagatttcccacagtcctggatagaaacatcagcaataccgagtaagaaggtttttaaatttcagaaatagtttcatcaaattcttcatacctaagagcattcatgttctaatgtaagggaatctgttccctgctgtggaataatccttcagtgtactgtgaagatgtgtggctctcattgttaataaaagctgattggctgacatctaggcaggattttcggggcagaaagaatgctgggaagaaaaaagggtggagtcagggagttccagagtcgcagagccagaagctgtagaagcaacacgggaagatcatagatgaggtaaatgctcagggcggcacatagatgagcagaaatgggttaatttaagttgtaagagctggctggagacaagcctaagttattggcggatcatttataattgctaataagactctgtgtagctatttggggagcagctggcggtacagagctaatgggcagtctagactgaaaactcagcctgcagttcttcaaactgttctgtcgcagagatccacctgcccctgccttctgagtgctggggttaaaggagtgcatcaccatggccagctttctcaaggggttccaaagacttggaatttcactgggcagtgttgttgtttcctttgaagtcagcaagtgagagcttttcccaagaaaagtggttactttttgtcacaagattgagtcttacaactacctgtaggaagttcttacctgtcaacagtgaaatgctttgtgtatctcagtgctctcagcttccctggtctttggttcacagtgtttctttgctaattctgccaccacctgtccagcagaagatgttcccactttcagacgttcaccaatggggcctgggaatgaagaaacactttctgagaattcttctgttattctatggtctttctttgtaatatatgttttttgaaaggtaataaatgatcaaaacaatcaacaataaatcaattttcctataagaggttatatgaaaagtcttggtgttttgttgttattgtgattgttgttgtttaaaaagatgtaataacaaatatataactcactaaattatcatcatatcaaatatatcacaatatttataaaaatccaataacatgtaaaagtatctccatgtcattcaaacttaagacaatagaaaacattgaaagagaaatgaaacatttgcacaaaataatgttgaatgaacattaaagcttgtcaggggcctagagaaatggctcagtggttaagagcactagctgctcttccagaggacccagtttgattcctagcacccacatgacagttcacaactgtctgtaaccacagtttcaggggatctgggacctttttctggtttctgctggcaccaggaatgcaagtggtacacaggcatacatggaggcaaaacactacactacacacacacacacacacacacacacacacacacacacacacaaccacacacacaaccacacacatacacacacacacaaatatatatatatatatatatatatatatatatatatatatataaatgtatatatatgtatacacacatatactgttttaaatatttttgtatgcttcttcttaagttgactttattttcaggagtaagtcactcttagcagccaacagggccatgggcacacagcaacagctatcacttaggagtgaacccctgcctcctgctcctcctgcctccacagctgcgttctgtttttaacctggcagttgtacatgctgcctttcctataatctgacaagttcctaactggaatgcagacaagattaatattttaacacttcagcaaaggaaaacagaatgaaaaaaaaaaaagagagaacagaatgatataattggaagggacccaagatacagtgtcacatggaacaatctagtctttgatctgttcattggtgttttagaaaaggacctcatggctaaataaagttggacattaaagcaggctcttttcttcagagtttcccatgtctttaacccactgacatgctctgtggacacgtgaggatggaatgggaatgaaggcttttcatcactcactgggggaacgcaggtcttgctgcgttagtgtacactgtgtgtgaagatggtggttggtgctgtcttgatggcaagggggatattgaggaagaaaggtgacaccaaggtgctctagttttacaccaagacttcggggtggtgctaatattttgggattgagagacacctctaggcctgggagctttacattcattgtgacaaaccttgcagagaggctctgagctcagcataccgagagtaagatcacattttatccctgcccacctagggcatgggaagaggtgttaccagctgtggtcacaaagctggcttgactactcccttttcttcttctcccatgtggtgcagtgggtcttagaagacacatcagtcccacatagctgaaggtttctatgctttgacctctatttctccaccccgtctagaatgggcttcattccttactgttaagaagtggggagaagatcttttcaggtttcggttgatagctcctctggtttctccatcacagttcaaggatactaatgaaaaggagaggcaagaggagaatctgggatggctacaagggatgtcttagccatttccttgacttcacaaaaggctcttttttcctcatccataagatgggccagtatgaatgttatttctactccctttggttgtttttagctttgggggtggaggtggaagagacacacagcctttaggttgtgtattaattactgcttagttatgtcactaaaaatcaaacactatacaccccagcaacaagtcaattgttctcccagaaagtggctcacactttggcaaggaaagcagtagctgaggctagccttgactctttcatccccacctcccatgttctgggattacagctgtgctgccaagctcagtccttttcttctaattccctccttcatcactcttcactgcgtgaaggttttcctggttttggacttgaggaggattttatggagaggaggcagagaacccctaggtcctgtagagtgaaaggacccaggcaaaaatgctcagcacaggaggctgcacctcatttttgtttcagttggctttgttcaatcatttctggtgaagagtaaatgtgcttaaatctcctattgaaggcgctttatccagagagttcaatagtgtgaacagacgccgtgtgaagggaaccggtttctaagcagatgtataggcagggcaagaaggacaagaataagaaaacaatgtgtttgctgcaattacaacaatgaaaagaaaacaaaaaacttcccatcctgagagaaatgttaccaaaatggattctgggtaggtcctggggactgaagggcctgacagggtgtgtttcctcaccacaaatgttcctgctgagtacacacacacacacacacacacacacacacacacacacacacggtgcccaaacacacacacacacacacacacacacacacacacacacacacacacacacacggtgcccagcctccagtttcacctctggcagagcctaacaattctcagctctcctttccagggttatttttggccaggactgttctctgatggcaaaaggtttcagccccctcccacctccctctctgtccttactagggagagaaacttgtgctggagctaagctgactctcagggtgtgaggagaaaggcctgccaacaggacaggacccaggctagcacgaactccagtcctaggcactcttctagagagtgtgcaacaggttccgctggaaggttgagtccctcagctggacagaaggtggagttggggacccagtagctggccttggaatccagcttttgggatactcggaaagtcaggccagctggggaaagaaaccgaggacagctgggcgatcctctgggaagaagctgggccgcagaaaactttatctgaggaggactccactccgggcgggcgtggaggggacccgcggggagcagcggcaggagggcggggaggggcggggagggcgctaggcggagccgggagcgcggccaggcggcggggccccgggcgggcggcagatccccgaggctcccgcagccgcggcaggaccggccagcggcgccatggaggggagccccatcccggtgctgacggtgcccacggcgccctacgaggaccagcggccggctggcggtggcgggctgcggcgacccacaggcctcttcgagggtcagcgcaactacctgcctaacttcatccagagtgtgctgtcgtccatcgacctgcgcgaccgccagggttgtaccatggtggtgggcagcgacggcaggtacttcagcaggacggccactgagatcgtggtgcagatggctgcggccaacggggtgagtggctcccacgcccggtttgcagtccccgagcccgggccacctccctagtgagtgctctcttcagcttcccacacctgcgcaccggcggccgctaggcacactggagaccctggccttcaagggggctgttctcaaagccctgggtctggaaccttaggcttctcccgcacctgttctacttctgtattcccttcctcgtgcatttgccacgccatcccagctctgggtttcccatattctctcaaacgattttggcccatctcttcacacagacttcccccccaccccgagtctgccaacatgatttcccacccaggtgttcatcatcatcttcatcatcattgttttgctaccatcctctcccaaatcttagccgtcgaacttaacgattacttgcacacacacacacacacacacacacacacacacacacacacacacacaaacacacccacccacccggtattgaaccggtgagctatttcccaagagcgggcccctgcgaatcactttacctcaatggccatttagtgactactttgattgggatagggatggggtggatggctttgggggcattgcagcctggcctcccagttcccaggaggcatatcgccagagggtatcgcaattgcaattcccaacttctctccaagacgctttttgcatttgacaagccaggcctcttccttctcatcgacacctttatttcctctcccttctcccaagatctctgcagttttcttctgcagcttggtttctcagactttgaggttcttgccttcagctccctcttccttattcctcatacagaagcatgttccggttaaatccactctgttctccctagtttgctccccctgacccccaaatccagcgaccaaaacttgcgactaccaaactttgactactctgtaggaaacagggttttcaaacgttatctgagtccgattaaacacgaccagagtcacaccaacgaaactttccctcgagtgaaatctcttgcagatgtacatatgtaaacatcttcaaaagtgaaactagatcattacctggcatgtggattcctctctatgatctcatttcttcttagtgttcctcctttagagatgccgggcttcatgtttcctaatgtgattttctcttctcagcatgttaggaatggaaataggggacaaaagatgttttgtgagatttttgttgtggtggatattttttaatatccccccccaaaaaaacattttggggaaatggaaccagaggttttagagttgattccaaactggcatttatctttggctcttcacctaggattgatgaatcttggctagagtctggggttggtgagaggttgacaaatactctttccctcttgtctgacatagctattcctgggaatgatgggaggataatgagccctgagagagctatgacagcattcaccctccttcatgctctagtttgtcagggggtgagaaaaacatagcctatccagtatttattgtgggtcagaatatttgttgaagatagttgctgattggcatttcaagcagtcacttggaccagtttcctctcaatttttctcatcttctgggagacttgtctgaagtgaacaggcagatagttggctctagaagaaatgtagtttggcaggactagaaaataatgagcaatatagatctttgtgtgattgaatgtagatgggaactcacttgccttctaaccttcatgctgtgttaggctgaggggcaaccaacctggattcctaaagcctttaaatagattcctgactggacattcataaacaggatacaaaaataacggaatgggaaaatctgattatcacgtggtctgtcattcctacatctgaaaaagtttggttttgattgaaaagttaatataattgtttgaataagaatgacactcccccccccccccatagactcatatgttagggaatggcactatttgagaaggattagaaggtgtggccttgctgggtgttggtggtgcacacctttaatctcagcactcgggaggcagaggcaggcagatctctgtgagttcgaggctagcctggtctacagagtgagttccaggacagcctccaaaacaatatagagaaaccctgtatcgaaaaaaaaccaaaaaaaaaaaaaagtgtggccttgttggagtaggtgtggtcttgttggaggaagtgcatcactgggggttggctttaatcctatgccaggtccattctctccctgctgcctgtgggttaggatgtagaactcttgctgcttctatagcatcttgtctgcctgtgaacctccacgcttcctgccaggccgataatggactaagcctctgaaactgtaagcaagcccccaattaaatgctttctttataagtgttgtcatagtcatggcatctctttacagcaatagaacatagactaagacagttaattttacaaggaaattttctaagaaaagctgtacttagtatttggtaatataattgttggaggagaacagaactatgaaatttctaaatagtgaatatattacatatattttattagatcatcaggcttcatgatgtatttcatactagttactgtataatttgggatttgaacatttcttggattaaaagtatgggtgtggagccagaaagatggctcagcaggtaaaggttcttgcctctaaatctgattactgagtttgattcctggagcccaggtggcaggagtgactcctgaaaattgttctctgacttccacatgtgtgttgtgatgtatgtgcgcacatgtgtgcatgcatgcacacacacatataataaataagtgtaacaaattaaaaattatgtttgggatagtgtatgtctacactctcatgcatgctcgggtgagtgtgcgcgctcgcacacacacacacacacacacacacacacacacgtgtacataaaaataaaacctaagacaaaatttaaaaatttatgaaaatttccagcttccagacaagtcaagataggagccatagctccattttatgtttgtgccattctttttggtttaaatgtttaaattttcttaagaaagctagcattttcagtatggatttcttaagaaataagaacgctttcccacgtagttataactctacatctgggttcactctgttgttttaaaattctcttatgggtgatttattcaaaccaagttctcctaatcaaggaatatacattgcatttggcaatttaggtcaatttttaacctacaaaatactgtctcctgcctgtctatctgtgcatctgtctatgaaactgacttttcaaagaatcaggacagttgccctgtagactatttcttctgggcttttcaggtgtatttttacagcaccatttcacttttcattctaccccttgttttacttgttgactaagaaattggttctgaagacagtcttagtccatttgcattgctgtaacaaaatgccatgaacggtagcttgcacacaacagaagctcatttcaaagcagttctagaggctgcaagcccaaggtcagggctctggttattttggcatctggtgaaggtccagtttctggcttgcagaattgtgctttcttactgtggcttcacatagtgggagggccttgctaattcttgaggtctctttttatcaagggcactaaaacccaatcatgatgactctatcctcatcacctaaactctctcccaaatgcctaacttccaactgtcagcttgggcttaggatttcagtgtatgaattttgggggatatgagcattcagtccttttgtaaagctcaattgattcagttttaacttatttttttagtaagagtatttcagagcctggtgtggcagggcaagcctctgatgccatcacagggagtggtagggggctgataggaggattatggtggtccacttgggaaacaaaaaacaagaaaaaaatcagagttaattcagtatgttcattttttccagactttaggttttacttctgctccttcttccctgtgctgcaggtggaatcgccttttggtatatctactcagtctccccactctaacccctcatccacctcaagtgcagcaatcagcactttgggggctttgaatgatctgcatcctgtgaagtgcaagctgtgtgttctcagcaatagtgacaacagaaggactgcagagtcctggtggtcactgtttctatgtcccaccattcattccttcctcggttctagtcagctgtgggctccgctttatactatgtgcatgttgggtttcttatcaacatttacttagtggcttaaaatccactaatgaccatctcttaaactagttcattggaggtttcaaagtagtgttagcaggtgtggtgcgtgcgtgcgtgcgtgcgtgcgtgcgtgcgtgcgtgcgtgtgtgcgtgtgtgtgtgtgtgtgtgtgtgtgtgtgtgtgtgtgtgtgatgtattccacagcatgtgttaggtcagaggaccacttttgggagttggttctctcctgccatgtgggtcctggtgaaggaattaccttttcagccatttcctcagccccatgccttgccttttacttgggtatggggggagcggcaagggttgaactcaggtatccatgtttgcaaagcaagcgctttacttgcgtcatctctccagccttcagggcattcttttatgaactggacattgtccttacaactgggctacttagttcttgctcctgaaaaggaggcactctgtctctttcacactgccaactctggagcagggatttaagaaaatagccatctccacaattggactttatgataattgaatttgtttcacttttggctttggggaatgattcatggattcttggattttatgcattcaatttcagtgcactggtgaataaataagatagtttacgctttccagcctccactccgtgctaggaactcaggccttgggaatgctgggagagtgctccacctctcatcaataactgaagctctctcatctttatattttctatataaatttacctaaacccccctgagaaaaatctttaatttttttaaagacacaaaccatgttataccttagagtgaaaggaaaacagtggctatgtataaaaagtcaataggactgaactgtaaagcaaatagcatctaatcttatcaacaagattagtttgatgtttgaacctgtttctattgccatctcattcagatcatcttcagaatcatcatagacacagacacacagatacatagacacacagacacacacagacacacagacacacacacacacacacacacagacacagacacacacagagacacacacagacacaggcacagacacacacacacacacacacacacacacagacacacagacacagcacacacagacacagacacacacacagacacagacacacacacacagacacacacacacacacacacacacacacacacacacacagacacacaggcacagacacacagacacacaggcacagacacacagacacagacacacacagacacagacacacagacacacaaacacagacacacaggcacagacacacagatacagacacacacacacacagacacacacacacacacacacacacacagagacacacaggcacagacacacagacacacaggcacagacacacagacacagacacacacagacacagacacacacagacacagacacacagacacacaaacacagacacacaggcacagacacacagatacagacacacacacacacacagacacacacacacacacacacacacacagagagacacacaggcacagacacacagacacacaggcacagacacacagacacagacacacacagacacagacacacagacacacaaacacagacacacaggcacagacacacagatacagacacacacacacacagacacacacacacacacacacacacacacacacacacacacacacttcccatgctttaaagagctttagagctaaatgcagcaagttgctgtaaaaatgcccttgcccttttctgggtgggttcagctacagttaggatcaatcacataatctctcttcagctggaatcttcttacatagctctaactgcctttaatattgggcactgtgctatcctcaagatgtttctggatttttcttaaagtttctttctctgcacccaaccttagtcagcagaccatgaagccactgaggtcttccttctctggagatgatattctatagcataattctccaatggtggaagtgtttaagaatcagcatgacagttgaacaggtgaaatgctagtgtaaccaatgagctatatagttttaagtttttctgtcgttttaattgaataaggtagaaatagaaacagtcacaagtagttaatgggcaccagtcatttccttctcttgaagaacaaagaagtctgtttgacaattctggttcctccagtgctttctctaattggttcctccaatgctttgctaagctgcgcctcccatgtcatcacatattacaaatatacacttgaaaagtctgcacaagatttctgaatgtgacaaccttggaggtaatgagatggagaaatagccttgggtcagcagccggaaggtggaccttcttttccttgctctgccactcaagttgcacagtagacaaattaacttggcatgcctagaagtcactgcccatattcaaatttggcatgaaataccactaactatcctgaagtccaatcaagccttgttctggaatgcactttgtaacatttaagccattgtgtttataggcggagtttctgtactgccagccagttccccaataaccacagagacttactattaattataaatgctcagctgatagcttagacttgtttttaactaacgctttttttttttttttttttttttgctttggagaccaggctggccttgaactcacagagatccgcctgcctctgcctcccgagtgctgggattaaaggtgtgtgcccggtttataacttaaattaacccatttctactagtctatgtgctgccccgaggcttgtttacctcatctatgaagttcccatgttgccacttttggctctcctgactcttaaagactccctgactctgccccttcttcttcttcccagcattctctctgcctggaaaatcctgccaagctattggccaatgagttttttttattaacaatgagagcaacacatcttcacagtggacagtcatttttcatggttgtgacaaatgcctacagtgttagggatgaagatttaatttatcccaccatttctgaggtgtcaatctgtggtcagtctgctatgaacccatgatgaggcagaagaccatggtgacaggaacatgtggctaagcaaagttgccccccaccatggtggtcagaaaatttagtgatatggggggtgcagggacaagtgatgtgtttccagggcatgctcccagtttcccacttcccccaaatagtttctctctaccaatattgccattatgttgtgactaccaggacttaatcctgactaggtggaaaccccaggactcaatcacttctctcaaagtccatcaatccgtaactcattttctcagcagcaaacctttgggagacatctcagcttcaaaccatgttttaacaacaaaaaacgaagtgttgttgtggccaactgaatgtagatatttataatttaaccatatgtattgaacaaagtctgccatgagtctcttgacagaaaccgacagctctgttgtacattttagccaagagaaaatccatttgttggtgaggtatgaactgtactgataatatgatgaccagcaatgagaagcaaagggtacagaaaattgaagagattgcaagtgctagtcagtgtcagtgaaatcttttggaggtggaagctgaattgcagtcacctgagacaagttgggtcagctggggattggagattgccccccagacaggtgctcccacttgttgcatgatcccagttgtccatggaaagctggatgttccccagaatgagaatgtgcttgttttggcgcttgttacaactatctgcggagcagatcttggtatggtttcctaggctgtactggtagtgggtgggcgtgcagaaagaaagagcctctccctgtgcttcagcacctagggcctctttcctgcattagatctgaaaatctagggttgggtggtctagggtcctgcctttagggaaagagtgattccttcatgtttttaactagtgttcattatagaactgctggacagactaagctacagttcagacgttaggaaaagcaggcttgtggtccactcaggagaaacctgaaagggccttccataactttgcctcactgccctttctggatctccatacctgagtgtggaacaggcaagttccccgggagcaacaatgcacttcaggagcccatggctgccttcgtttccctgtgtgacgagtgttcggctgacactttaagcctcctgtcttcattcactttttttatggggacgttaaaggagtgggagagtctgagaacagctgggccctcccagctgctggctggttattttaagctttggttaacgtgtcctgagacccagatggcattctgaactaagctgtttgttaaatcttgtgacaaaatataatgatgtttatggaaaatgcagacacacacccacaacataatgtgtaaaacttgccctaacaataatttttgatgaaaagtctattatgatggaccctttgtgaactccagaagttttttggtctcttcacagacttgaggactaggacatagtgtccacctttagaacagcccaaacataggtattgagtccgccagcattaactctcattttagggtcctgcccattgttacagaacagcaatatggataagcattgaaatagaattttagcaaggtttcttgggaataatagccaggagaaaatggatcccaggaatacaaaaatgaagatggagagctagggctttagtgtgaggcatgggccatgagccctgtaggtagacctgaaacactcaagactggcccgtatgctttcacagagaaagaggcatttaaactcctctcatctgattccaccatgatagttatgaataaatgcctatctataaattaacaagatttttaaaagtgaagacccatgttttctgagtcattaaatatcatgtaccttgtatggttttagtgacatcaacttttggagcaatgtctgtatttgtatgaagagaaaataattcagggacactaagccatcagggaagagcttttccttggcctggagtcacaggagcttttgacttttctattctcattccaagtctttactgagaaacattttgtacaaacatactattaagttattgccttcctattgttttcctttaagaagattcctggtttctagctagtgctatctagttttatatttaggatttccaaaggtggggggcatgactgaaatcagagttagagttaagtttatgcaataaaagatctcagaaaatacagagaggagagttttaaaactaatgggtcttacctccaatacagaacacacccttccaaatcaagacgaaaacccaaacaatttaatacaaaagttgtcaccaacacacacacaaagtaatcaacctcattgtaaccagataaatctaaataaaaataatgggtatgttaaaaaatgaaaatactcaagagttggtgtggctatgggaaagtcatcatgtttacattgcatattgttgatgatatattatatgtcacataacatgtgttacattacaatgtgttatactacatattgctaatagacacaacattttggtcagtcagcttggtcagtatatatcttatctagtagtctttacacaacagcccaggaatgtggtaatctaagaatcagttctgtagatgtttaactataaatgtgcaagcctgtattcaacaacgctcactgtacactttgctaaaagaacattggaaaacaatctatatactccatagtggagacaaggcacatgacttatggcatggctacacaatgatactactattaaaatccaaaaaaatggacaatgtggaaatatagtatgagaaagatgtgaatggcagtttgctaactggaaaagcaatcactgggagtgcacgatcccatttttttgtgataaggtcagcaaatagggttggactcccaacagttacagtggggaaatctgtgtgtgtctgtggtggatggaaggagaatccctttcctttctactttatacacttttctaattaagagagttatacatccgtatattcattgatttcataattaaagacattagtagtgagatgcaggggagttgggctagaggatcatataagcttacagggccagactgggcaatacaagctgttctctatcttaataaccaaccaaccaaccacacaaaacataacatgctaccaccaaaaactagtatttaagaaacaaagtaaaaataggaaaaggtcaggagtttatctatggtgatgttgcttccaaccttcatgaccaggggaaatcacacagccttggggttggtttataaaaatggagagagtagtgagacttgcctctatattttctaggtagctcagtggcttaatgtaatgaattattaagaattatttttgttcacaccacaaggacatttgctcaactatgtttatagcaacattattcgtaatagccaggtcttagaaacaacctagatgaccctcaactgaaaaatggataaagaaaatgtgttacatttacacaacggaatactactcagtggtaagaaacgatgacatcctaaaatttgcagggaaatggtcagaactagaaaaaaaaatcccgagtgatgtaactcagacccagaaaggcaaatatagtatgtacccactcaaaagtgaatagcagacataatgcaaaagttacccagcctacaatccacaaccccagagaagctagaaccctcttccagaaacaggtggaagcagatgcagaaatccacaactaaccattgggccaaactcgtggagaacaatggaagtgagggaagagtgattatatgaacaaagaggtcaagattatgatggggaaacccacagaatcagctgacccgtgctagtgagagatagctgaatctagtctgacaaatgggaaaactgcataagaccgaactagattcctctagtataggtgacaatggtgtggctgggacaatatatgaggccactggcagtgggtccaagatctaacactaatgcacaaactgacttagtggagcccattctatatggagagatagcttgctcagcctagacataagggtgtggggggtggagaggtgccttggtcctgcctcaaggagatgatgggacagacttagtagacttcctaggggaggccttaccctttttgaggagcagatgggaggtgggggaggggaagtgggggagtaggaggagaggaaggagggggactgggattggaatataaaaaaataataaaaatgtttaaagaaaagaaaaagcgaaaaaataattttctctattcatatgatgtaattgttacaaaaatatctcgctttgatgaaaaggaagcagagtgtgctttttaaccatggccttgtaaccagaggctcctgttggtctggtgaccacagttgcttcctagggcttcctcttgacttttggcatttctccctgctgctggcaagctgggtggcaactgctgaagacacacaccatccccgctcttcccagctgtgcctgcacacacatgcgtgcctctgaatggtccttgaggtggcggcagttgctcccacaaagactgactcaacccaaaggactttcccggggcagtcttaatgttgtctcctgaagggaactagctgggtcaacatcatacttttccgtagttaacctttctgcccttcagtctttgtggagacaccaatcccggccaccaggcttaccccactgccctttcctgaagccagcccttaatctactcatttcacgaagcttttctgacccaatgggctgggctgtgtgagagaccactgaaaggaacgggcccagcagaagctgggagcctccacgctaatctcactaatcggctgaggagtctgaaaatgcacagctgttggagctcgcttggctagcaagcacttggttaggatatttgtcaggggcttgtgcctgcagctctgtttagtgtttggttaggaggcatgctggtttttttttgggagaatctctcaaatgtacagtgacagatgcagacacggaaggcctggaatggctgtcataaataatagtaaactgtttaatcttcctgagttgtaaatctgatggcagaggtctttagtttaccagttcactgtaacataggataaagggtggggccacttagaaaatgggcagttactatttcccagtcaggcagaaattggtctgaggagattcatttaaaaacacacataaatgaattttaaaattgattgtgataactactcagagaaaacatgtgactttaaagagattactaaaatcttatgtgcaatctttaatgtaaaagctacccctaaaatgggtgtggatatatatgtgtgcattctgtctactttacccagtagcatatgcccaggaccccattctctttacccctcacagagctgtatttttcccttgaatatgtttaagaggagtcttcatttccttttctgttgctgtataagcttccatgactaaaataatttaaaggagagaggattcattgtatctcagagttcaaggtctgtccatcatggtggggaagtcatggcaggagcttgaagtattttgtcacaccacttttcaaatcaggcaatagacagggatgaatgcataccaggtagtgctcagtgtctctttctccactgtatacgggtcaggattccctgcccaaggaatggtctgatccacaattaagatgggtcttattgtaaacaagacactctcccctctcaggcgagccctctccaaatgattctagagtctgtcaacttgacaacttaacactatcccagaggatagggtcctaaatgtcggaaatgtttgatgacatcatagagccaaaacagatacccaaatcttcctactgacctgtgtttctagaacattcagtagacctggtgatggattgagaaaagaatatgaggtgtataaatctgatggttctagacaggcttctctctcacaaggatagctttgtgagttgagttcaatgacactggtgactggagcatgcaagcgacagggtcagtgaggcacttccaggacaatataagaagacttggttgatggggctgtcattccctcccgtagactttggcagcttgttagtgagcagatttggtggctaaaaagacactgtagctatggacaaattctatagactgaagtgcttcttagttactggcaaacataaccagtttaagttacacctctagatagcttcagtcatcaaacatggaattgctttacaaatagaaacttgaggtaaaacacttttatattcaccagtcaataatagtccatttaaataatggaagattatatacccactaaaatcatgttgagaaaattattcagtgtcatgaaaagttagacttgcccagaaagacacatgtcacatgtcctctcttatatgtatgtcctagcttcaagactttagatttgaggggttgactttcagtatttgtagaagttgagaaactaaaaagggtagggggatgggagaaagattgtaagaaagtggtggtatggaggggaaaagggagtaatgggaggtgattaagtgatggaggagaggacagaagaccagataggggagggttaattaacactaaggtttgataaaaccatatggaaactaactattttataatctgtgagcttacacacacaacacacacacacacacacacacacacacacacacacacacacacacgagagggatatatatatatatatatatatatatatagagagagagagagagagagagagagagagagaggcacaagagagagagagagagagagagagagagagagagagagagagagatgactaagtgaataatgtaggcttttgtccaatgtgtaaagacaactgaaacagacagagaccaagtctgtgcctggaaatgtagacaatagctgtaggtggtaggattacaaatgatttttttaaagatttatttatttatttattatatatacaatattctgcctgcatgtatgcctgcaggcgggaagagggcaccagatctcattatagatggttatgagccaccacgtgggtgctgggaattgaactcaggacctctggaagagcagtcagtgctcttaacctctgagccatctctccagcccgacagatgatttttttactttgttgttatgtacatcataaatgtttgacaaaataaacataggagaaaactatttcaagttagaacctggtgacagtgacacattcgttcatttttaagcaatgtcaccagctagagaaaggcagtgggatgtgctgaaggattgattgccaggtgctgggcatcgtgacttggaactttgctattttccttccttggctcccatcatgtgatcgtttagatcctttagaaagcaaagctgagatgcagaggggccaaggatcttgcccagagcacagaggcagggagcttagtctttttaaatagaattttatgttggtaccagcttgtcttggcttgacgacctgttctgccttcttcactcagggtgacacagcaggcattggcaatttttattattggtctactggggtgactgtacctcacaaagtcttagcagtttactgagtcaggctcaaggacaggctccagagcattctccaagcacctaactacctgattgggaggaggacacaccttccaggttttactccattttgcaactgaagtcaagtagatttcccgatctcagtgaaattttcagaatgggctgactgagcaacttctatatgcctgtcaggttttgtcacatgttcagacactaggaatggcatgagaaatctgtgctcttttgcttcagatacactgtcagtcctccttccagcaccagagtgtatataatgccttccaagggtccaggaagctgggtatgtatccggctgttcccatctggttcccatgtaagaaagcgtatagctgacaatttatccatgtgcaaatggagaagtcccttgatgtttgggtaaccacatccatgctttgcccgagtctgttacttcgttaaattccactgagccatccatctccttactcacacagcactccttaagggttgtcatctctctctgacagcagggacttaaagactgaacgctttgtgttcatgtatatggcagcttggctgcatgtatgaacaaccttaaccctaaccttaaccctagccctagccctagccctagccctagccctagccctagccctagccctagccctaacccctaaccctaaccccaaccctagccctagccctaaccccaaccctaaccccaacccctaaaccccaaccctagccctaaccgctaatcctaaccctaaccctgtaaccctgttggtttgtgcgtgcgtgcgtgcgttgcgtgcgtgtgtgtgtgtgtgtgtgtgtgtgtgtgtgtgtgtgtgtgtgtgtacagcaaggacaggaaacaggtcttttatatattatattactaaccatagcacttcataggaggacatggtagcgtctgtgtggtcctgtggaacactctgtgaagcatggaggatgtgtctgtttattgttctctttactttcctcgattcactctgggatgtgatcccattaaatgtgattccattttagggccgtgacccaggttgtgggagacactgaggagtgccaaacttacctttcttttctcttttaataaatgacttacttaaaactaaaagggagtcacagcaggtcatttttcttgagagagttcacatatgagaccaatctgcttttattagtgttatgttactggagaactcactcaccatggaggttctgtatctactctgggatttcagccttagggttgaaattgtacatctctgctcccaaggactttaattggaactaattagaaagtgaactcatactaaatctaatttagaagagcagttgctagcattctgaaagaaaaagagaaagcatgaataaaataatgagttagttgcatgcacatgatgcaaagaaatggaagagatgaagagaaagcctttgtgtcacattgtttccatcttagacactgggtctgtgactacattgtttccatcttagacactgtgacctgtcaaggggcactttataatatctgcactagccatgtcccttgttaggggaagacaatagcgatatgagcaggtgagggttaaggcttggtgggagggggcgcttggcatccttaggagaacaagcagggagcagcataaggagccgccaccatgtcccttcacccctgcatttaaagttccagctgagtgagagtcagttgacctgtctctctacttagctctgaatctggtaaggcgtatgcccagtttacatatctgcacagtcctgtgtgctaatgtctctcctgcatggcgtcgcctctgtctggctgcctcctgtgctgtgaagtctcagggaattagggtttgttccaccttctttccaagttggagctgaatgtctctctctagtggcaataaggaccctccacaggagactggttctgcaaggctgggtgggatcacccttagatccagccaaagccatgcagcaggaagttcagagtaggtagggacttcagaattctatactttggcctccacaggtgagccgagttttacttagaaacactaggcaggtgttgctcttccgtgatgtgctcagaatcaaagccagttagggaagcaaactatggtttctttgcaaggcagctgtcttcgacttaggcaaagggtggtatttttaagactttcccagaaagtgaaccaatggattaaagtagaatctgctatctagaaaaaaaaattaagaagtgtagagattggagaggacattgttattattttgggtcatgtctacttttaaaagagttcttctttaaagaatcctaagtgaacacttaaggtttttcagataaagacattaagctcagggggtttaatggtacatccttcgttttttccacctctaaacttgacagaaactagaagtaactgggaattgggagctcagtggagaagatgcctccatcatgtttactgtgggcacacctgacaggtctgaccccactgtggggtgcctgctctgggcaggtggtcctgggaggtatgagaagggcaggatgaacaagtcatggaaagaaagacagtaagcaatgttcctccatggcttttgctttagctcctgcaactgtagaggcattttcctgatgctaattggtgtaggaaggcctagcctactaagggcagtgccatcccttggcaggagggcctgggctgtataataaaggtggtggagcaagtcaaggggaacagccagtaagcagcacttctccaagtcctgtgcttcagctcctgactccaggatcctgctttgagtccctgccttgactttactcaatgagggaccataaattataaactgacataaataccacctccccaagttgcttttgttctcgggtgttttatcatagcaatagaagaggaaccaggacatggtactggagtcatatgtagtttcaaattgggtgccttcctttattcagcaagtctcaaatgtgcatttatcttaacaattgctagatgctaaaaaaccacaacttttctgatgatgtttgtcttgggttaactgggaaagggaaggttaacagaagagagaacaatatagacacacagaggagaacatgggaggactgagacctgagtaatgggtagataccggaaaccagagcagtgctggaggcccatctcccggggccatctgtggatgtgtggccttgctggcactttgattttgtacttcagaactataagaagccaacatgctcgtgttttagccacttcattgttgacagtttgttgtggcagccctaggaaagggtactgatttagttttcagattttatattaatttgttaagtctaccataacaaatgatccacttagcttaaaacaacagcaatttattttctcacagatctggagcccagaagttgaaatgaaggcattggcagggccatgctccctggagactctggaaggatctgttccatggctcgtctagctcctggtggcatttggcattccttggctttctgggcacggctcaaccacagccctcttggcctctgtcttcatcttctctctgggtgtcttcccctctgtgtgtctgtgtttgagtaaagtgctgaccttccatgatggaactggctcgaatgaatcagcctgctatctggttgaccaccccaggagaatgcagccatattggagcttgggttgatttctgctgttggcagattagacaggcaacaggggaggagggcagggcagcctagcagaacagaactccatgtttctgagctcatccatacatctttaccatggtggtcacttgcctcatgagcttttggacagtgacaggagtaggtaggggaagaggttaatgggaacttatagaatgggccctcattcttgatttttgtgttggttagttttggtcaacttgacacaagctaggctcacctgggaagagagaatgtcaatagaagaattgcctccatcagattggcctgtggagacattttcctgattgctaattgatgtaagacggcctagcctactaagggcactgccatcccttggcaggcgggcctggctctataacaaaggtagtagagcaagtcaaggggcacagccagtaagaagcacttccccaaggcctctgcttcagctcctgcctccaggttcctgccttgagtacctgccctgacttcttctagtgaagtaaacttcctagagttgtaagctgaaataaaccctttctccttaggttgattttggtcatggttttattccagcaacagagacctaattaggacagaagcccatggcttactctgctcattcctagtgctcaccactctcctgtggctctctcctgatttttttgtgagctgctaattatgtttgccacacctgggcaattaagaactaattacttttaaatggctaagtagtattccataatttgttttcttgcattgctttgtctaactggttctttactgctggatacgattattttaaaaatttcactttaagtaaatgtaccacaagacacatctagatgcatgcacctcttccaattttattaacttatttattaactagttaatttattgtgctagcgttggaatccatgacttcatgaagcatcctaggcaaatgcttggccactgagctgtgcctcaacctcttatctaccagttaaaaacttatttctttaaaaataagtacaagcagtggggcagacaaacaattaagaatggatgtcattagcaatttacagataatctttgagggcaatgggtgtgtgtccctgtttgcacattgcttgtttcatggtagtactcaacatgagttgtgtgacagtgggaatttcaatggaagtgtatggaagatgctttgtcatggccctggataataatggggtgtctgtaccatcctccgtcctccttatcttggtcagaggtactactgtgcattattcctgactgctttctcagagctccagcctttcctactggttgaaactgagcatagcctggtggcttatatagtagcatgctttggtcagacaggagatggtcacttctgcatggggattctcatgtggtccctgtctagtattggtaggagttttgtcatatgacgaatcgatagaggcctgaggttctgctgcaagtgacttactcatgagactaccacatggtgcaggctattgatggtagtcactggttcctccacacagagttatgaggacccgtgaaggtcttcagaacatagtgctgccagactctccatgaataagcagtccaagagagccgggtgaagagtgtcagcatcattgtcagccccatggtggacatggctggtgggattgtattgattgccttgactgggactgctcaggaactgcacagggctgcaagggcagaaggcaaggccccctggggtctgtgtggagactgactcccacagcgtctcccttccattcttcaccccaattgcatgttttgttcattagcaacatttcacaaactgaacatctctatttctagtctctacccagtttaggatgctattagctaatagcccctgatagcttttcacctggttaattctttgctgggcctcaaggatctgtttatctctctctttagtgtataagattccttcaagtatcccattcttccctgaattcccagagtgagcatgcagggatggacctttgctcttgactcagtggggggtctttttttcctgatttttttatatttattttttattagttcaaattaggaacaagcttgcttcacatgtcaatcccttctccctctcccttccttcctccccaaccccctatcagccccccaccctatcccccctccactccccagggagggtagggccctccatgggggctctccaaagtccaccacatcatcctgggccaggccggggccctgccccatgtgtccaggcaaagagagcattgcttagagtccttcttgtttcctagttcctttggtgacaaggattgtagactggtaatcctttgctctatgtctaaaattcatatatgagtgagtacataccatgtttgtctttttgtgactgggttacctcactcaggttttttctagttccatccatttgccttcgaatttcaatattctcagtgggggtcttttaattctcattttaaagttgattaatatgttagttatatattatgtatttaattgtggcatttccacacatgtatataatatattttgattatatgtgccctttcccattaccctcataatgacttcttgccacagctctgttcagtgtggggaagagaagatttcccaacatcctctgtcagtgcagctagctgccttgggtgtggcttttattacccttcctcaatgttcttaaatgttctgtcactgaaaacacagtgtgagtttgatgaggctctctccttgtcttaaactgattcaaaccctgctcttgtcctcactagccctaagaggagggagcacgcagggctgagccctctagtgtgtactctgggctctttcacctgttctgcttccctaaattttctttctttctttctttctttctttctttctttctttctttcttactttctttctttctttctttctttgctacttagattagtgtttttcttcttttacccttctattaggatagctgatgtccaagtatccctacccccatggggacagtctggcagtccatgtgtcctattgtcatttttgttgctgtgataaaatggcccaacaaaaacaatgtacaattccaggctatagtccattgttgttaggaagttgagccagaaatttcaaacagatagtcatgtcacacccaccatcaaaaacagagagaaatgaatacatatgtgcttgtttacttctgttcaccttggtttctccactcatacacagttaaggatattgcctagggaatggggctgcccacatatccattaattgagacagcctccctccccacaggcatgtacacaggtaaattcaatgtagacaacactctattgagactttctaggtggttctaggttgacaaaggtaaccatcacaccattatgggtatcatcttccatttcctcctttcccagtgtatttttcatacagaacttgttcactagttttaatattaaccaattcacagatatttactacacacttactgtctggaaggtttattctgggttatttagaaacagtgaaataaatagttcttgggggttatacacgtgggtaaataaataatatggaaagtattaggtgataagataggagacaagaaacattatcaagataaatagaaaacaattcaaggcagggactgtgagtactgcttttcatagggctgtcatagtttctatctgtcacattggggtagaaacccaaaggtgtggcctcaagagtgagatgtgaccagtcacattgaatgtgcagtcgggaagcagagagttatgtatgctgccactgttggctttcttctttctatctggtccaagaccacagcccatagaatggtacagacatttaaggcaggtcttcctccctccctcagttaacctatctagatcatccctggagatgtgcctggagatttgtttccatggtgattataaatcacatcaatacagcaatcaagattaagtatcacacagaagaagcaagagaagtaggaatcagttctcttcttatcctttgtcatttctaacaccttcatctttacagtttctgagtcagaactgaactaagaatttatgtgggctcagcaaacttgtaggtcatcaaaagtagatattacaaactatcagagatgagtggtccttaagtacttaccagtcactagtggaaaactagatatgagcagcccaagtgggcttggagactttgggcagaacaaacaatattagaacacttttattcagctttcctgacataaaacctgctcaatccctttggataggagattggttacctcttaaaagatcctggggtactttcctgttgagatgccttaagttccatgaacctcaaactgatttttttcctggatggtttagattggacgactgattattggacagaatggcatcttgtcaacacctgcagtctcctgcattattaggaagatcaaggcagctggtggaatcatcctcacggccagccactgtcccggaggaccagggggagagtttggagtgaagtttaatgttgcaaatggaggtatgtggttctggctatggcttacatgatttctttcctcatgtatcatcatactctgcgatggttaagaggcaaagtgaagagaaatcagctcagaaaaattcggtggggtgcccaaggtgatgtgatcccaaggaagtaacatatggtctctcagatgttcagagctggtctactgatctcctctgtgcttcagccaagtgaaagactggatagttgatatgtaaccaatacaggaggactctgaattttaaagttagaacagaccccgaaggctgtttaaaacatcctctcattttccaaagaaaccaatggaagctccaggacactgagttacacgtcacaaggctgcttagagacagttaaatgatttttagcctaagtctcgatgtcagtgtagactttctctctctctctctctctctctttctctctctctctctctctctctctctatatatatatatatataatatatatatatatatatatattgagaaagggaattatttcatttgttcataaatttatggaaatgtatagtctggagccctagagagcagtaagatgaattacttttaaaaaaaagaatgtacaaaaaagtagggagagtgataaatgaccccaggtacccattactgtgcttttctcacttttgtaatcatttgaacccctggggtgttgtaaggcaaaattcagtatgcagaccctatacctaaatattttggtgtttgttttttaaagaaagacacattcccacacaactatagtaacatgccggctacttgcttttcttgttgtttctaattcctgatgtgaagcaactcgaggaaggaagggtttgtgttggctcacaggttgaggagatacagtctgccatggaagggaaggtgtgcggggcaggaaagtgaggctgctgatgagggagggaaaagtagggagggaaaatgggggaaggaagaaaaagctggggtttagttggcttctttctatttccccttttattctgtgtgaggcctcagcccatggaacggtgccacccacaccttccctccccaattagaaacaacctcaagaggtgttgtctcctaggtgactccaaatccagtcaagttgacaatgaagattaaccatcacatacctaacaaaaaataacactaaccctctaacatcatatgaaacctaatctctagtcacttttcctcccagtgattatcaaagtgttatttacagctatttcatttttaaaaaagagatgcatctcagaactgtacatttgtttactaagactcttcagtctcttttaatctagaatatcaaatatgtttgcttatgaaaagcacaagctgaactttaataaaaaccagttattattgtgaattattcctggccccaggcaaaacagcacaagagtacattgtgaagatgaatttattattgttctttctctgaagccattttgcacattatttaaaaaataaactattcatgttgaatgtgaaacacacacacacacacacacacacactaattacaaggaaaagctacagcaagtctatacctgaggaagtaattaaaaattaatactataggaaatcaccaagccacaaaagaagatacaaaaagtggaagatagtaacaaagagcccagcaaacaaccaaacaacagtcaactaagtggctggggttagtacttatgagtaatgccccaggatgtaaatggattgacatcttcaactgaaatattcggagtggctgaatggatatcgaaaagagccatctccttgctgcctgtaactgactctttgaagctttacaagcacacataaacggaaagggaaggggcaggaaaagatatttctggaagagagacagcaaaggaaatcaaagttggcaacacttcggtaaaatacaactccagtcaaataagtattacaaggtaaaaagaaggttgtcatgtaatgataaaggcatcagtccactaagaggccataggaattattaacctggatgtgctcagtgctgaggctcctgaatatgtaaagcaaatcttaatagatatgaaggaagaaatgggcatcagaacaatagcaggggatttcaatatcccatttccaacaatgggtagatcaacaagacagaaagttttcaagaaaatatgggatttgaactgcactttgaaccaaatggaccttgcaggcatgaatataacttgctctcgcatggcagcagcagggtacatgttctcccccaggacatgtagaacattgtttaggcagagcacatgttagaaaataaaataacaaattgaagaatcatatggactatcaccttatactttctagaatggctactatgaaatagtaagagatgaatggtagagaggatgcagagaaagagaagcctagcacagctggctagatcatagattggcacaaccattaaggaaaacagtatgggggaaaagtggaaattcctaagagcaagccatgtctcttctgcttctacatacaatgttggatcactatatggagaagaaatctgcacttccatttttttgtagcattgtccacaatagctaagatatagaaataacccaactatctgttagtagatgaatggatgaagaatgtgatacacacatgatacacaaatgtcatttgtcacaacatggatggacctggaggacattctgccaagttaaacaagtgtgagcttacttacaggtggagtcaactatagtcaactatacagagatggagaataaaacaacacttgtcattgttggtgagggcatgggggaggggaactggggaactagagatcagaggtcaccaagcaacagacatgttggatgaacaactctgaggatataatgtacaggatgagtgttgtggatgactgaattgcaatatagtcatgattttttttcagttttatcttacttgttttgctacaaaaaactgcttgtgtgatgataggtaagttaatttgctctaccatagtaatcattttgttctctctgtgtgtgtatctgtgtgtatctgtgtatatacatgtatgtgtatgtatatagaggccagaggtcaatttccagaggccagaggtcaacctttagggttattccttttttttttttttttttttttttagagacaagatgttttactgacctggaacttgctagaattactcttttgtataacaacattcctctctgaggaactcaacagtgtcccataagaatggcattaatctcatctgatgatggtacttccatcaacttaactgcttttcactaggccaaaggtcctgcgacatcagcaccaacacagagtggaccaatgtgaaccattggtgggcattagctatagccaagccaaagcaatttatatacccactttgtagatgacaatgtaaggacgttatgctttaatgagagggtttgtggatgaccttatcactaagcctttacttacgttgaaaatccttctaccattctaacttgtaatttaacttctaacatgtttgcatgtctcatgaaatgaacattcctaatggcaagggaagactcagcttcttcctccttagagtgtattttatcactacattcatcttctaaagttacagcatctatctctcctgactgtgtattaaactgatgctccttgaggatggaacttatctatatacttagtaggctcaggtacgtgggggcatatttgaaatcaacttgctttttaagtatgttttgagaacgaggagaccaataaaaatgttgatgttcagttctccctctaggctggaaacctgctcagccccctctgtatgttatctgttgacttcttatagctaagtgtgtgtgtgtgtgtgtgtgttgtgtgtgtaaaccctttttgatctggcaaacctaaaaattcaaacacaaaacaagattcttcttttaaaaaagtttttgtgaagggtaaaaaatggtaaggaggggctagaaagatggcccagtggttaaggacatgcattgcccttccataggatccaagtttgattcccagtaactgtaactgactcttaaatcacatgatttacaattgcctgtaaccccagctccagtggatccaatcccccgccctctgtgaatacttgcaattatgtgcacacacacacacaccatgcatacacaaattaaaaataataaaaataaataatttaaaaacattttcaaatgacaatgaataaaggaaaaaggctttgtgcatttctctctctctctctctctctttctctctctctctactgtatgtacatgtgtacctatgtatgtatgtatgtatgtatgtatgtatgtatgtatgtatatgtagctgtgtgcatatttgaaggccagaggttgacatcaggtggcttctgttgtcactgtccaccttgtcttttgagacaaggtctctctcactgaagtgattggctagattaactgaccagtgagttcctagaatcctgtttttctaccccggtcccctagcactgggttataggcctggctttttacattgtgtcagctcaggttctcatggttgtatggcaaagcacattactgactcatctatctcccaggcccttctgtgtgtttgagattttcaatcatccaatgtaagagaatagttgatgtaaccaatgaagctgtcttctgccttacctgttggaatggggctattgccattcctttttatagacattgtttcttattctaagaaagcagctttattcaatacaaatgtattatgaaccatatatagtatttaacatttttataatacttgtattaaaatgttataaggatgtctaggtaatataatttatttaacatactatatccaaacatttcaatatataaacataaaatgttaatataacctgttatatggtgtttgtactaacttaaaattttgatatgcattttacaattgtagcagtttatagcttcagtttgactactgacattttcagctactcagtagctaaatgtggcggatggtcattgtattggatagtacagctctatggagtaggaaatgaaatgtatctggacacagtttctgctcagtaggaagctatactgtagtcagcaactatgattcgcactcaaaactatctagttgtcttttatatttaaggccattcactatacttatttatttaattcctaacattctccaagatcaaacaaaacccaatgaagcctcatgtgaaggcatatgtgtttaaagggaggaggaaaccaactactgatttcatactcaactcatttaaaatctgtctctccatcactgttgccaatttgaccttctgataaatctgctaagtatttttagttatccctcagtttaaaactagttgtgctggaaagtgtgaactagaaaaattaattacctggaaaagctcacatatcaatgagacagtagtaagaagagatactttttttcatttttttaaataagaacactgatttgctctttaatgcggctaaggttttgtttgttttaaccattataaccatatacatattattttccaacaatctcatcctttagaggcccttatcattatacttacaaaaaatgcttatcgttcctaagattttcttcaaaataatatgggagcagtaaaataggttgggtaagaagagataatttttttaagttcatttggagagctgtggtttaaatctggaagtcctcacttctgtcaaacgcatgtcctgtttgtgcgtcatatcccaaataaagctaattacataaccgggtctccccagcaggtgcaaagctatttttagagttatatgtatcattgcttggaagcagattaaaacacatgtgtgggttgttagtttacatagaaaaggcagggctgatcaaatatcctctacagtgaatgaatacaacctgggaaataccttgtctaattgaactgtggatctttgttcattgtggagagaccagatgtgtccctcctttctagtgcctggggccagtaatgtttctctgattgaaattccgaaggctttaaattaaacacatttgggtgtcacattttaggtcctgcaccagatgttgtctcagacaaaatctaccagatcagcaaaacaattgaggaatacgccatatgtcctgatcttcgaattgacctatctcgacttgggagacaagaatttgacctggagaacaagttcaaaccattcagaggtaacacacaatttgaagaaataaaaaaaaaatccatgaagaggggtgtgtatggtggagtccaggtatgcatgaggtttcagaagtccttattggtgatcagtggtttctgtaggcaaggattctcatgagaaatactgaattagtcatttaaggagtggctcaggttgacgttataataaaagtatatgcagtgcagaaagaaactggaaaaatctctgtatttagatcttgacactttcaaaagccactatccaaactgtattgttttcaacataggaaaagattttggttgactccatcattgcatacatggaatagactgtggatgaccaaaacttgcctttgaataattcctaaacagttaagttgaggatatggggaaatctaagtttagagagataaaagccaatggattgttaaacttccctcgagaggtaggagtctctgccaggtcagagccatgcagttctgcttagctttacacattaaggttgaccacctgctctataccaagtactgtgtccagagattttacaaaggaattcggtaattactgagtgtgtttaggcaagtggtccaagaattaaacaaccaagcctggcagagtggcacacaatataaccacagaacttgggagactgaagaagcatgtttatgatttcatagtttctgagagacttgagtatttggggaactctttgctgcacccacactgttccttgagtgacttctctaaagtaatagtctggaagtaggtggaagtttttctcattcccaaagataatcctttgaggtaatttatgtgctatattcctactgttttaagtgatgagcaatgcttgaattaattgaaaataaacagtccttggtatgtcagcttatggtgtcaagaacatgtattagataatgggagtgttcgattttcctgaatgacttgcttccttgaacggtctctggtgaatatcaaatatttttagacaaatgactcaagagctgaagaaccagaatgaaattcccaaaaatatcttatgttattgagtaagtaaaatgtctaaagcattcacagcataaaattaagcatttcagatgtatagttcacagacagcggtttttaattattttctgaattaatattcttcatatatcagaagatgactaaatatagtctgtgtgccttaaaaagtaattaaatttgagtagatattcatatgtcaatttaaatgtaagagaaacattttgagacatttggccagatgaaggagtaatttatatcacatattaaatattgtacctgggttactgacaaattattgattgataatatctttaacgtaggcctaagtgtttcagctccaaagtagtatgacattgaaaagtaatagatttgtataactttaaaaatttaattatagggggctggaaaaatggctttctagttatgagcacttactgctcttccagaatatcatttggtttccagcacccaggaagctaataactaccctccactccaacttcagggtatccaatgactctggcatctggaggcacctgcactcatgtgcacatccttaaatgtgtgtatacagccacacacatgcgctcacgcacacacagttaaagagataatagatatagatgtaactacaaatttaaaaaagactgctttcctagacaaaattttagtttccccaaactcaaacatttacttctcctaggaaaaatgctttctgggcactagttatgtacaggtagatgtttgaaaatggcgccttgttctgtgtgctggttttcatgagttaaataagaaggtttacttgggattctcagtgacacactggagagcttttgtgcttcctgaggagctgcagatgtttggcattaccctggaaattaggtggtagtcagggtgtgaaagagggtttatgtgaaatcagaatccagccctacatcacagttctgtgcttggatccagtgtgttttttgtagcacttggaaaacaagggccacagctgaggtcactcctttacatgtttcccaccagctgagtcattctttggctaacccacaggaagacctctgcatatgtgggatgcttgttagcattgttgtgtgtgtgtagccaggggagggaggtgtagagaaggtgtgggcagggatgacagtgcatttgcatcctaaactcttctagtggttaattttaccttgcaggaaaaatgtagaatattctttgtaccattacttatctgaaaagtttgttacattttgattgtgctgtgatttgagtttttgcttacaaatgaacccttccctgcccacgtagcatgtgggttagatgggattttgatcagaactttgcatcattagggtagtaaattttttgtgcctctagagatgatttctgggtctgcccattgacatcctcccatccctgttttcccaccttcagtggagattgtggaccccgttgacatctatctcaaccttcttcgaacaatctttgactttaatgctatcaagagtttgctgactgggcctagccagctgaagatccgagttgatgccatgcacggaggtgagcttgtatttttcttttcttttttttttttaaacacttgtctgtcagacatgagatcacaattttttaaaagattttatttatttattatgtatacaacattctgcttccatgtatatctgcacaccagaagagggagggcaccaaatctcataacggatggttgtgagccaccatgtggttgctgggaattgaactcaggacctctggaagagcagtcagtgctcttaacctctgagccatctctccagcctgagcttgtatttttctaaaagcagtggctgagaactgttaaggacctctacatgttcggatatatggaatgttctagaaaatttcaaggctctggctactttcttttgatgtaaatgaaaacaaaaattgaacaagcaactttgggactggaccatgtgagtgtaaagcagatcaagattacctatttattggcttttttaaaaaatcatgctacattccataacttaaacagctgaataaaattatgaaaaacatggatgcccaattccttttggcagtcagtgtcctattttctggtgtcaacctttttcaactcctctagtgattttaaaggtatttattgccttcttatgaataccacaaatatataattctttattaacttttcatttttgaagaatatggggttcttactggacttttatggtcaactctccacgtctcccagcagctgctactggcaatcatttatctttcttccgccttcattgttttgccttttctagacggttatataaatgaaagaataagctcagtagtcttttgcttcacatttcattgagcatactgtttttattttttattttttttatgacgttcatggaacgtgtgtctcttcttgttctttgttactgctgagtaatatcccactgtgttgatgtactacaattgtctatctatttgctagttgataaaaattagctttccccaccccaagtgtttggctactacaattaaaggtgctatgaatattcacaaacaggtctttgtgggaatgtatgttttcatttgttttgggtaaatttctagacacagggttgaagagtctaatggtagtattttctgaactacataagaactcagctgttggccaaagtagctgttccctttacaaacacaccagcaatgttgagggcttcagtgtctgcattcctacaagtgctcacgtgtgccaccttttctgtttccgccattttgctccatcctgttcatctcttttaaggcattctccctgtgtgaataggttcctctttgctgtttgtttcagactcatatttagagtgttcctcaagatcttcgtgatctttggcttcctggcatgctgagcatcagttgggacctctgagtgcactcgggtctcatcttccaggagctttgctctgagggtttgtggttgggatgttttgtcctttttcttggactgatgctattctctaggaaaagctcttttgagtccttggcctgatctggctcagggaaaagacagctgaatttctgtgtttgcagctcattatgtccatcttcaaatcaggcaccctggttgaggattgggggacacagtggtcagatgtaggtcacttccctacctgagggggcagtgttttagccataccctagttgcatgagttgatttggagaaagatgtgattttctgaaagaaaactgatgcttcctctagaggaggggacatagggactgggtcacaagacaagagatgttcatggtatgagaactgtattgtgttgggagaaaccacaggaaagtgatctcacacacatttcagctgagaggactatatggtggccctatcacaggctctctcttgctttaatggcttccacttgtgtggtccccctactaacacacttctcagatttatattcttccctcaagtcctactcaaaacactgctttctttgggaagtttcaccgatgggtgttgtttttataagtcatggtgtcccattagatatctcccttttggtctcacttctctattcttctgaagatatgacttgtctcagtattagataagagcccaggaatagaagagtcatgcatctcaccctctttaacctgatcctttgagttcttaacataggggttcaacgttgggtctcctggtccacataactgctactattgcatagcattcattgttttgcaggaggtgctttattttttatgaagcttctgggatttggatgtgtaacttggcaatgttacaacaattatgcaaagagaataagagaattaatagttccctttagtgcttttgatatgctcagttgaagtgcttaatacatgaaaaccagcaggtaataaatcgttattattgagttgatttctataaggcagtgttttaggaaaccataaggaaaataatttcatctcactggatgattgacacttggtagatgctcaataagtggtaattgatatgattattatttttcatgttgtgtcctaaaaaacaaaaagtgacggtataatttctatttttcttcaaggctcttaagcaagttgtttttgcctttttctaaccagaagaaaaaacctagggaagagtattcttcaagtatttttatattctcgtctatctttttttagttatgggaccctatgtgagaaaagttctgtgcgatgagctgggggccccggccaactctgctataaactgtgtcccactagaagactttggaggtcagcacccggacccaaacctgacatatgcaaccacccttctggaagccatgaaagggggagagtatggatttggagctgcgtttgatgctgatggggtaagtgggaggcttccccatctgtgtcctgctccccacgtgatgggagaagtaccagaagccagagaacctggagtaaacatacatggggcatgcctctgctctgctgttcagtgctagataacaccgtgaagcaggcacagctttttttagtttcagattgatgtacgttcaggaggaattatttctttaagaagatagacaatcaattttcatttatctctggctttgctgaaggcatcacataaatgaactggctctttaccagttactaacaactctccagtctgtgtgggggaggaaggggttgagtctgtggaggtcacggatacacgaggtagcagtgcacacatcccaacaggtggagcacattcccgctgtattctgggcccccgaggaatttatatggtttcccatgcttcctttgacctattccaattgtctcaggttgtttaaatggcaggaaaatggcttgtgctgatgttggaagctgggtatgatgaccagatgcttctctgtggtaattttcacacattccttctcacaggaccgttatatgatccttggccaaaatggcttctttgtgagtccctcggactcacttgccatcattgccgccaacctctcttgcattccgtatttccgtcagatgggggttcgagggttcgggaggagtatgccaaccagcatggctctggacaggtaagcaaggatgttactgtgactcacagtagacctctgatgtcaagaccttatgttggtaactggctctcattctccctgctccactgcaagctgggtgacagcctggagacttgggaatatggtgtggtatagccatgtagaaatcaggtggtctgagctggattgttctttcttatttgatctccatgtcttacttttcttatctgtaatatagggatgctgacaatagcatccttacatagattgtggtgaggtatggatgaggtcatgctttctgtccccaccggtgcttgcttgttccaaaagtcatataactagaattctctacgatagacttctttgttgttggcttgtttcatttaatagtttctgttcatccatatgcatttaattgaaacatagtgagtatctcataaatatgttgtcttcccaaatctgagggtatatataagtaaaaagaaaagagcatggagtttgagatcagattatattatatactagactcagctttcattttcatcaagtgagtgaaaacagggatgctacatcacaggttgttgtaagaatggaatgatggtgtgcatagagcacccaacaggaggttcactctggaggcccatgatagtggggcctggatttgatcaaatccagagcctcagacatgctagggaagcactctgccactgatttctattgctgttcctgtacctgatgctttccaacagtgttcaatattatagaagagtcgatcctttgctgcgtcattcttctcctcctttttaatttatccttatcattgcatacgtcaaaagcacatctctccttgttttttgtttgtttgtttgtttgtttgtttttggtttttcgagacagggtttcactgtggctttggaggctgtcctggaactagctcttgtagaccaggctggtctcgaactcacagagatccgcctgcctctgcttccctagtgctgggattaaaggcgtgcgccaccaacatctctccttgttatgctgtatattattaatatatgagaacattatcatttgttttctccagtttctcattgatagacgtctgggctctctgtagccagtagctatttaaaggttttgttgttgacacacttcaattagtcctgggtaaatatctaagaataaatgttggttttaggatagttgtatatctaagaagctgacaaactgttttctgtcttacatgtttttcagcaatgtgggggcttgtgtttgctactgtgttttttgttaatgattcgtggaggtttttatatttgttggatcagtcttttgtcaaatatagtattgtctgtattttccctgactgtagcttgcctctactccccccccgcccgcccctgccctacacctctgtgtatgcatatgaaggccagaagtcaacctcagatgttgaccacactggcctagaaattatcacataggctagggatccacatgtctctgccttcccagggttggaatcactcacctgcccccttacccagctttctaacatgggttttgggcaagtatgatacgactgaaatatctccgcttttcattttctaattagtgacttttgatgatcagagattctgaatttttatggaatccagtttactaatttttttcttatgcttcactaattatattgttactacaaatgcttttaacttctatgagagatatttgtttactcttgtgtgatactattcttgggatatatgagcaagcatctactgaagacagaccaaagtaaggataccactaaggtccaacgtggtggaccaagttttagtggggttgcttacctgagtttgagggaagggttacttccaggagaagaggtgacttaacgacagtggcatcgctgaaagctcacctcagcatgggtgaccgctcatcaaagttggaactctggagcacacagcacaacctgcaggctgctcagtaggttggagagtgcccttccagccattcaggtggcctgagcttccttgggtagctggctggtctgttcctcccaggtggcttggttggtctgaacttctcctaaagagcccagcttatctgagggtctcttaacagttcttacaacttatatatgtgtgggggaagagggacctatcatatctggccagtttcagggacttcctgaagccattcagttgtttacttcctgaatcttaatgagattccttccaagatggatggtctttggaggaaatggctacacactactctttagagcagaaggatatttcccctgtgtttttcttgtgaatagctacagtcataacatttacatttgcgctttcaattttcagttcattttaatgtgtggtgtgaggtaacggttgaggatcatttttcccccacgttcagttgctccaacactattaatgggaggaatttttctcttcattgaacagtattgatttctttgttaaaaactggcccatcatatgcttatgtggatctctttggactctttatcctattccatttattttactggctttttacaaagacactacactgaaatcaggaggccacccatgcagtcattttcattctttgcctagttagtatgtatatatttcctaggctttctccatttctacaggcattttagaattgatatgtcacatcagagttcacatcagagctggttgggaccttgatagagattctgttgaatctgtgaagccatctgaggaggattacattttactaatattggatcttccaatctgtggatgtatttctaaataggttttcttcaatttctcttacataaaaacttgaagtttttagtgcagatgtcttacaggttttgttaaatttattgctatttccatattttgagcctgttgtaagtggagtagttttttttgttaaaggattttatttttatttatgtgtacatgtatgtttgtgtgagtgaatgccatatggtacatgtgcccaaggaaaggatcctgggcactgtgcagcttacttgatattccaggattctgcttaaatacaattttataatttagacagaatttgctatatttaagcaatatatatcttgcttaaactggcaatagttttgtgaggacattttgtcagtcattcctctcttcatattaatgaaccagtcatcagaaaagttaagagccttgtattgggtctcacagctaactggaaactggcaggatttgaccctgtgcttctgatataggttactattgtagcttctcagggatctggagagacccagccaacactgatgaaaacattgtccagctctcctgtgaggtagccaacagctttccaaaccatggccggcagtgggaagtttcattctaacgacagaaaccatttgtcctcttctcttgtggaaatgtcccagtagctcttgattttgcatcatctactttcccaagacaacgtccattcagtcagaggccagggcccttgcctagagactcacaaagggcctgttctgatacgtgagtgaccgtttaaaaggattattcatgcttgctggttgggattcagaattctgtggggctctgacctgctgatttgttttgggtatttgatctgctgggctgctcccctgtggattctcatgatagacactttataagctctttcttcctggtgaacaaatgcagcttcaaaagtccatcttcttgtggtttcccaaattacttagtattattattttaaatgaacagaaccataggattgtatccataaataccagggtagcagttgaatgcttgagatatatccaaaggcccagttactcctggtgtttcaaaatgggtgggcacctttgaaactggtaaattatccaaactttcattattcgcagataaatctgatgtttccccaaaagagacttccattgtctttaatttctatcctcacagtgtttaataaaacaaaggttgcacttacccccggataataaagtttcctctttgaaaatggcattctttggggactctgtcatctcaatgtgactgatttgtggcacagatgagctgcattgttgaaaacattatggtacagatgatttgagaagcaatgcacattcaaagtatatttgtggcccaaggtccgtctccacccacacggagatattaaataacccttggtgtcatcatcattcagtaatatttatgacgctcccatctgtgcttggggctgtgccgaatgctgtacaaagcaagtcaaacttacagcctcaagctctactcactagagtagaactctccttgaagacatccaaaggacccagtatgttttgactacaaacaaggccatttgtgtaaacagaatagtgacacattagtgagcttcaacctttacttttggtgccacctgtgtatttagtatttattcactagaagatatattctaagcactgtctatgccctattgctatggcagaactcactatctgataggaaaggcagaaaataacatgtaaagaaaagatgtggacacacaagttgtatgatgatgtgaacttggtatagtaaaacttggtgaggaggggacatcttgcttagaatgagtagttacagaaagactctgacgaggtcacagataggtcatgggccatcagaaacatgcagctgggcctggctggaaggctgggatgagaaggcccatataacacatatgaaaacacttactccccccccccaagtctgtggtttgctgtggtttgctgccaatccccagtctaaaatatggactgtagcttatcttgatcatgctcagctggttcctggaattcagacagtgttaatcctgcaagtatgcaagtttctactgatgtatggtgaccttgacccttgccacatccacaattctgtgctgtttcatatcctgcatcagtcataatgtacatggcaatgagaaacatagtgagttagtggctggtcactcagctcccatagattgcttttgcaacaaaatgatggcagcattttgcctcagcagataaatatggttgggtttcctatactgagacagcagagagaaaaattgggaaagtctttatcataggttgccatgacactcctcaccaattaggatgaaggaaaaaaaaaaaaaaagaagacagtgctctcaaagagctgttcttgcagaggaccctgagtttggttcctagcagccatgttggtcagttcacaactgcctgtaactccagctgtggggaatctgatgcctccttctgccctccactcatgtgtgcacacctccacagagacatgcttgcatacacatcaacaaaaattcacctaaaaaaaagaaaaaggtttaccaaagagaatctaatagtctgtggaagcatgaatgaaaaaccctgcaagttcagaaaagaatgggacggtcaatgtgaccagcaataacggataagaatcccttaggactggagggtcaagggcaaggatcagtgaagcccagcaccgtgcgctctgaaattgtgaacctggctgttggtggggactgaacttatagggagggaaaaataaggacctctgtcccctcatgtttagtgtcctgccggtgcctactgctgactaacctaacagggcctggaggttcactttaggaagaagagcaggacactgagtgaaatggggatcaaagaatggaaggcggcaaccaaagaatcatcagagcaacctgcacaccagccattctggaccactctgcctgctcactatacttccagtctctgtcctttggggggcctcagacccagacagacaagtttgtcatacccatcatctcataactggcccaatgagaagacctttcctttttaaaaaaaattggtttcttacataaactagttttttggtgctggtgatcaaacacatattgggcaaagtgctgttctactctggagggcttatttcttatcacttgaaaaacatccagtatttgtgctttttctaactgactgctccaccacagagcacagtgggatgcttgagtgtcctactgtgtgtctgactcagtctctcttttccagtcttgcatttattgcttctggttctcacacactttcctccttcggctattgtgataattgataaactggtctcctgctcgtctacatctcatactctggattctcccaaggaccctgtcctaaagcacaaaaatcacaccactctccttcctgaaaattggctggcggcctttggtgcctgtatgaggagatcctgcccatgccctgttatgacatcttcagtcttctagatatgtgcttcttgcagtcttcccctggtccatgcctcctcggtgcatttccaggcgcttttctgtgggaagtgtgctgtctttgcctgtttctcctcagcttgttctttttcttttaagcccggagtccagctttaccttctaagtgagtctttgatctcatagtccctctaccttaaagcagcgtatgagacttactcttcctgaatcttttgttgctatagtaactggcactaaaaacagtcttttttttttctaaatgctctgattgatagtcttttttttttaaaaaaaagattttatttatttattatgtatacaacattctgtttccatgtatccctgcactccagaagagggcaccagatctcattacagatggctgtgagccaccatatggttgctgggaattgaacttaggacctctggaagagcagtcagtgctcttaacctctgagccatctctccagcccctaaaaacagtctttttcttcataatttggcacagtacatgactttagtatgcagtgacatttcttcactttttggtacttgccaatttggaaaaaattgtttgcagtgccccacaaatggatacacacaattctgaaagattactatgcatggccagaagcccttctttgacttttgtaccaagataaacttggggatgctacaacttggatacaagggaaaatagacccagttgataagaagaaaacaaaggatgcctaaggacccggtctcatttgggtgtaataaaattgtgcttgtcttgtggttttcatgttcattaagttggagttcattaatggcaggtgagtacggaagcccgtgtcatgtgtgacttgatgtaagaggagatggcacgatcacttcctatctaataattcaaatctgctccaacctggtcttcagctcaggatgctctgcttcatgtcttggcaaatgggaggagtagtgagttcagttaggatgtttagatcaatggttctcaatcttcctaaggctgtgacctttaacacagtccctcatgttgtgttgactctctccccaaccataaaatcatttttcttgctactttataatggtagttatgaatactgttatgaatcataatgtaaaccctataaaagggttgtttgtccctcccaggggtcacaacccacaggttgagaactgctggtttagaggatgcctaacactccttccttcctgtgtggattttgtgttcacctcctagaaaggatgctgagaaggtttgcacttgatatccagtgtttccacatgtcagtctcaggaaggacagtgttagtggagggcgtttgtgtgtgtggctagagggacaggagtaagcgaacatttctgaatagaaggttcctggctttgaagacattgggtaaataaatcatctttccttcaagttttcagagtcatcttagatttctgctctgtgagattgacagaaaaccactatcactgttggatggccattaagtgttccaaaccaatccatgggaatgggaagatgaatgacttgtcaagtcccctctctctggtctgctatatttgtaagaattctttgttatttctgatcctgtcctggatgggctttgagattggttaaggtgtctaagacctcattcatagcccttttattgactcattctccttggcctttgggaaatcatattgaccactgacagatgtagccatactgagtgaattctcttagcatcttcatgatattgactggatttaagactaaagccagggtctcagagatttctggtaagtcaggggtatgccattatttgtagcttcattttggcttgtggagggtatgtttggttcaattacctcctttcattctttatgactgaaaatattcatctattgtaggcagcaatctaagggctgaggagatggtttagtgatttggaaagcaaatccttttggttgctatgaagagcaatgaggttatctggacagataacaatgcctggtgtcttgatgatggtggcagttatacaattgtatggacatgctaagctccatggagctatacatttaaagtgaaggaaaatggggtggtgaatcttattttatttgtaagctatacttaataagagcgacaaaataatcaaacccatttatgtaaaattgaagagagtgtttcttttgagtctttctctatcagcatcaggaaccaccacttcctgtgggtgactccccttgtcatggtggagaatttcacacacagaacttctgaaatggtgtttggagtcaggagacaggagagacttctagatatttttttctctttgtgccacaccagaacatatgcactatcagtaatctggtcttcattgtcaaagacttgccttcatttaaaactggaagtctttaagatcagtagtcaaatctattgactacaaaatggatacagggaagccagccagtgctatgtaactctgatgtatgtgcttggcatgtagcactgcttttacacggaagaaagtgaggaagctatcttaggcctgctgctttttccaggacataaagacgttgtgatctttgtatgtgcttctgatttgaaatgctttttgtaactcttactaacaaccaaatattaaatggattttaagtgctaacctcccagggtcatggtaagtagggtttattatagggctcaaatacttgctaaatattgattttacttgagggagggatgggatgtgagggaggcacacagggggaattgagaagctgcctgaattgctgactgaggggagactagagtgtgactgcatttttgtctccatgagcactgttgcaagtataccatttgtcacagaaacccacagaaatatttggagccgcctgtagtgtggacatggtatttatagaaaatatatgatgccaaggggttccataacttgtccaaggtcacatgacaaaaatgccatccaggttgtaaccatcagattgtctgcctcaagtcttgtttctttactattcctgctgttgggaacaacaaaagttctgcctgtaccgtgaatgggtatcacttgtgttggttggcctggagactactgtggcaggagagacatgttgcccaaatggtggtgggtgacacctgatacacacagataattttaacacaaaatgccttgtaattttcaacctggtttttgttgttttgtttgttttctgatttttgagcatgcccctttctttagttaagcttgggaggaagctgttcttggctttagcttgagacttccaggaaaatattgacaggagttcaaggtagagtttgaatttataccctcaccctagctgtaataccagcgtgagcggctgcactgaggctgttggtctggtttcagtagcgttgccaggctaccttctgtgcaagtggggtaagcagatatcatttcttctctctgagagttttaaatccaagacagacaacaccgctgacccaaaacgtaagtagtattgattaagtgatgagtctcttcagtagggagcgtgctatcagttgcatttcagacacccagtgccttaaaaagaagtctagacaggctctgcctgtatactctgcacaggtgagggtggaggccaggcctgagcatccttcattgcatctcagatctggtatctacctgaggtgtgactgtgtcatttggatttgcaatttacaggctcttctagagtcccctgtcagtaagtctgattgcatcagtggtttctatcctagcattgaggacaattctttggtgacttcaggcctgcattggagacagcaagatctctatccaggactcagatcgtatctgtcagggactttaaacagaacaggagagaaactagatgaaatgggacccaaatagttaagcagtgtttggcttgaacaaagcacaggctggcctcaggtgaaccttgacctagcagcttgtttgacctgagtattccctttcggctgtcccttggaagatgtcgctcatatcatcaggctccttgctgtctctctagggcagagttgatgtagcagacatctgcaggatttctgaacctcataccccatagcattctacttatgagactgagaggcaaagaaactaaacacatttccttgagtcttgaccctggttggagttttcaccagggccttaccagtgggaggggtggacagccttaagcctctccccctccttatgtagagccaggctgaaggtcattccttctcagaccaaatgatgaataatggatgcatttgttctttttgcccagtgaaagtggtaattgcagcaactttgggctgtgaagtacctgagtgtataggggtacaattttagaagggaattcagggtccccttctttttacttccttatgcccctgcaaatcccctattaccctattcactgataatggtggcatgggggtgcttgcccgtggccttgcttttttttttttttggtctttgggttttggtttttggttttgtcaaggcaggattcccctgtgtagccatccatgacctttacatattcatggtcacccagtccttgtcttctcctctctataccaccttgagccctttcttcctctctcccttattcttttctctccttcctttctccatctctccattatttctttactctgttacatacttctttccttacctaccttcgttttttcacttctcaaacaaacaaacaaaaaccctcatgcattcttggcccactatttagtccagcatatgacttctgccattttcagtctttcttgtattcctggtccactgcttatccagcatttgacttctggcactgatcttcacctctgcgttctatgttcatcaagcaaacttcacattcctaaatgaatgaatgtttcataaggtatttgaccagatctgagagggttagccgtctgaagttcaggaaggcacagcatcctaaagatctttcatctttgaagagcttccctagctgtgggaagagggagaggaaaaacaacataatttgagaacagcaagcatttagagctgctgggatattcaggcttctgtagaaactgggatgtggtcttctttgagctctcctgaaatctgtgtgcggaccaccagggtttgaactctgactctgatgcttcctggctttgtaaccttgggctgggatacatgattcttctagatgaggatgatgagagtactctccttcatcagtagtagatggagaaatacatggacttgcttagagcagtgttgtccatggtaggagcgtagagaagatgggcagttactatcagatggtgttttacagacgtcaaactgaagcatggtgaactagtctcaagataggtctccagctctatattgctagtcacttttctcattgctttgagacaagaagcaactgaagagaagaagggtttatcttggcttatagttcaatgggatcattccatcacagcagggaagtcatggtgaaaagagacggaggccagaagattacagtatatctgtagtcaggcagcagagagagaactgagcatgactggtcaatagaacctcaacactcaccccagtgacccacttcctctggggaggctcctccttctataggtgtcacaacctgcccaaatatctccatcagatggaggtcaggtgttcaaacacatctgtcccgacctgtaggacatcaacctggggcaagagagtcagggatagggaatgggggcaagagacacagaaagaacgaccacaagacaggattctgatcaagtggcaaactttacgtttttctcaggctagcgtatatagtcggcagagcaggatatggggaggggtagaatgggttgtttgtgatccaggtgttagtgtaggcaggatattaggaagccacaaagaggatgtttggcagggtaaagagtttatgaataagagttccaggaaagggttgcctaggtgactgagcctgtgggtggaggactgggtcaagttgtttcttttcttgagctgaggttctaaggagctgctatgtaaaggttaactatgtggcctgccaagcatggcctaggatctcatgccaatccctgagatttggctcccaacacacatgaacctatgggaaacattttacatgctgtggtggcacacacctctaattccagcatttgggaggcagaggcaggaggatctctgtgagttcaaggctagcctggtctacagagtgagttccaggacagccagggtaaacagagagaaatcctgtcttgagaaagattaaaaaataattaactgaaaataaattcacatttaggacttagcctttaaggcttgactcaacctctgtatcttctatgtaggttgtcaggttccttgctgtgggccctgtactcgtcacaacacagcaaggctttaggaagactgccatgtgatattcacatatacacagattttctgcttacctggtaattaataattgctgattttctttagcttttctttatatggacataaaggttttagttagttacctagggctaggtctattgccctttaatccatcttataaagttgtgacaaatgagaaattctgtgttctttgtttcctctatcaggcctttcatagaaacatgttggacactacacttctatctctttggaaaatttggttggtgggaggacttttgttgttattttgtttttcttgtaagacacatctgtgtctgcctgtgtgccggccaaaatccattaagttccttgaacatttatctctcccataaactgtgatgatagggttttgactgtatctcacagacatcccactaaaacatatgtgaactgtgtacatattgaaagcatttgcccatttcctaatctggttagtagttcagccaaaagctacaaaaataaaatacgagaaacaccataatgaactgttttgtgataaacttgttcacagagaggtttgtgagaatgaatttccttgttactttgtaatttctaaacaccagccaacctcagtttattgctataatcgtttgttttcttattttatgttaactttatgcttttctctgctaaaccactagtcgagtcttctaatgcattacagatagatggaagaggaaatattcaacctctcagatgggatttctttaaatgcatttaccaatcaggtggggccaggaacactagaaacttgaaagcaatgaatgattcagacaaggtctgtgagatttctagaaagaactctcatctaatgacattttgtgagccgcaggctgggttgtagctctgattggacatgactaagttgaggtgactgcattattactacaacaaaatgcttgaggcctctaatgttataaagagaaaaggttggtgcaagctatagttttggaggttcaagggcatggcatggcttcaattctggtgaagacccttccagctatagtcacatcatgacagaggcacacacacggaagtgctttatgttggcagacaggatgttagaaagacagagatgctggggtcctataccccttcataagtataacctaaatagcccaaatgcttgtgactaggccctacatcccagtggttctagcgtcttggagttcaagcttttcatcacacagttcaacaatgatactacactctatgtcaggagagatagctactgttgccaccaccccctcctcccccaccccttcttcgttctcagggctcaagacagtagaaactctgagtaccaaattcatgtcttagttgggaacaggggagggtaaagaaaggccacgaatacacagcttttaaggtggctcacagacgtggacagacacatctgaccaaagcccagtgttgagaactttgggggttgagaaatgtagtcattatacttcgtgtttacacacacacacacacacacacacacacacacacacacacacacacacctgaagttgggtgttcttatgaagaaaggggagatggtcagagaacagtctctgctgtagttttcaacaatgccttcaacattctctaaagaaaagagtgcttggtagagatataaaaattacctgagttttgctcaaaagttccgtttagactttgggagcccattccacatggaggtatgctttctcagcctggacacaggggggagggtctaggccctgcccaggatgatatgacagactttggggatcccccatggagggccttaccctcgctggagagcagaggcggatggggtgggggagttggtgggagttgggggaggaggggagggagagggagcagggattgacatgtgaagcaggcttgtttctaatttgaactaataaaaaataattttaaaaagttccctttaaagaactccagaggatgacacaaaccatgatgttcatggtactaataaagagaatgatggggagacgagggaggagggatatcttccagagaaaagatgtcaggctgttaagatgtagtaactcagagactagtgaataaagggataaataaattccttctttcaaaaacaagtacattgcttcacataggaaaagcacaccaagagcaaaccagcctggcagtgtcacggccttgggagttaaaggctttcagtcctaagcatcagacactcagtgtcctagcagtgagagaaagttgcattctgcctgttaaaacatgtagaaggggcatctccagaggggcagttgattctctgccaatacaatgagcctgctctgtcatgcttaggtgtggtcttttccaggtgaattattcctacaataaagcctacaatgttagaaagcatccagtgttagaaagacaaaggcttatataaagcatagttttggagattcaaaggcatggcagaggccccagcagtgctggccattaccctgacacaggacctggtcttaggaaaagaaaggggactgctttttacttacatcacacccaaccccaactggtacatctccagtgaacccctacacctaaggctcagggaaatcacagaaacgggggtgggaagataacaagaatcagaggaccagggtgatttctgtgaggtagtgttctctatatatacagggaagttgtactcaagaaatctcagccatgtggctacctccataagattagcataatgacaatgcagttgacatgccaacatggacaatgaaaattccttattgtcccaccaccactagatgagagccacaggtcatcagtgcctgggagagaaggaggaggaggctctgtctccttcaggaagaagctaccatgtaggttgtccaaccccaagtggtcagcctaggacacatgtacacacaagcaaagctaaatggactcaggaggctatatgtacatatgtgcatatatgcacacacatgtacatgtaacaatcattaaaaaaagagaccatgaacttgggaggggggttggggaggagagggaatagtaggaataaaaatatattaaacaagcaaaaagagtaaaaacagaaatcacaaaatacattccatgaaagtctcgaaaagttaatacaaatattaaaaaaaaatccaggaaaacaaaagacatctctgaagcccccctcccccacaggaggaaaagctgaccttgcttttccttgggaagtgataccttgttaaagtcccagttctgccagtaagaaaatcaatttaaattagttgcctatcattaaagaacattctagaataatggacgctttccaacaaatgctatcacttttggtgtcttttgcttattgtgactaattcacttgctcatcaagaaatatttatacctaatctgctctgtgttgctgcaataaacaccatgaccaacaaacagcaacttggggagaaaagggtttatttcagcttacaatttccaggtcacaggccatcactgagggaagtcagggcagaaagtcagggcaggaaactggaagcaggagttggaacaggggccatggagaaacaccgcttactggcttgctcagcttttgttcttaacacagcccaggcacacctgccaatgggtggtactgcctttgatgggctgggccctcccacatcaattatcaatcaagaaaaggcccaggttcttcaaaatgacaagatcaaccacacttggtctggtgacgtagcaaataggctcatgtttatgatttagtgagagagccaggcattagtggcaatacacaggatatgatataaggaattccttctatataggtcattaataagtggataaaagtcctgttgttgggccaaagtgatctggacctagtgtaacagttctttattcttttatgttatgaatgctgttcatgggcccccttaatgagcactgtaagaacgaccacatctttgctttgtacttccatttgagtagagtgctctgattatagcagtgcccatgtggcaactggggatgagctagctcaggaagatagtgtgcattctggaacaagccacccattggagtcacaaagtgcaatggtgcagggcaaaagcctagactcgagctgcacggtgatccaaggttgagcctgagaccccccattactcgccttcatgtagatgcatcattagctaaccttttacccttacctaacctttcacccctacctaacctttcacccctacccaacagtttacttcctaactaacctttcacccctacctaagctttcacccctacttaacctctccccactatctaacctttctgtgattgttttctcatttgtcaagtgaaagtcaactttgttgggttgtcatgaactcatatgggattattaatgtaggcgcttgcctgctgtgcagaaggccctggattcatccccatcacttggagaggcgagtagtaatgaagtccatatggaataaaaactcagtgaatactatctgttctttttttaaaaaatcattaataataaatatcctctgccttgttatttttctccctcacttaagaattttgcattattgaactgtttattgaagacaatcctgtctctaactcacgtcataacgttatgacaactgggagctaacctaaatgtgatgttcttcatgactcctgagctgagagccatgatgtttacatttctggtctggttctaataactaccataactaaatttcctaccttctccttcctctgtttgatactctctgaaagatggaagagtcaagggttaagcattgctaaattccttcctcttgggctttttggacccaccctttgtcaacaggtcaatttccaccagaatttttagatcttggagaccatgctcaaaccccatcccccctccaccaaaagtgttcagtatttttgagccaccatgcacagctggacatagcagcccctcccatgagactgcagggtatttatcttaatagagttctcctttgttgaactatgaaccatcctccattgtaagaagaggattccagagtgtggtgctgctggatgtgggtggagggatgggatgggggatgacgtgatagatttacatataggatagtgaagatggggaaatccagtggcttgaggctctggccgagacagaggatgctgctgtgctctttgggaagagagtcacaatcctacaggaaacatctgctttaatctgctccaacatcaacagaattgatgtggtaggaacctgttgttactgcacgggctccatttctccagccaggccttggctgagatcagcactgtttggacaggcagcaccatgtggtctcctttgtcaaaacgtggatgtagcaagcagtggtatttgggaatatcctgtggctatttttctatttaaagggactgttttcttctaaacctggccagctatctttgtttccatatctttcattttatgttttctctttttcccctctcagcatatttccatcctgggtttcaaataagtcaatgctttgcatcctggtttctaccaccacaggagtgacaaaggctccctgtggtatagcaggtttgtgcccaagagtatcaaaacgtctgtaatcgctgtgtgaactcacaggcacactcacacagccacaaaaccacagaggttgtcaactgcacttaaggtacatctgcttctttttgccctaagaatcacttactttgctggggagacactcatagggtaacagggcctgccaacaagcctggagacctgagtttgagccacacaatggaatgagaatcctgaaagttgtcctttgatttccacatgtgtatcaaggcatgtgtgccccacccttacacacatgtacacaaaagaaatcaaatataattaatgaaatgtaaatgtgatggtaagatagctaagtaggtaaaggtgcttggcatgtaacctagttacatgaattggatcctaaaactcatgtcaaggtggaagcagaaactgaactccccaaagttgttctctgagccccagagggagagagagaaagagagagggagaatgagagaaagagagagaaagagaaagagggggggagagaaggagggagggagaagtgttgtacccatacatacatatcatgtacatacagacacatgtacaataataattgggggaaaatggaattagttatctagaattagctagtgatcatacttttggggagactaccttattttgcactatttgaaaaagtagtgttggtacctgatacttaatttttgcccctgtattccttttgtgtgtattctctctctctctctctctctctctctctctctctctctctctctctctctctctctctctctctctctctctgtgtgtgtatacataatgtgtgtggaggccagaggttgatgtcaggtgtctttctcagacgttctctttcagaaaaatcccatttctaggacctagaaatgattgtagaagaagcccatattgttgttgagattttagcaatatcagttccagcatggctggtacgtattgaaggatgtccaagtcctgtgaaagtgtagtgcatttgctgaagacctgagagataagttagccatgcacaggaagatggaagagtagagaggctccttctataagtgttctgcctggttactgggtaagcaatgactttatgttatttatatgaaactggaacagtaagagaaaaacagatattggtgaagtacttttactccaaagcagtccatccaagaagtcatgtgtggttccgatagcacccctgtaccagcacatgatgagagttgtataaacaacttaacccctctgccccctgtaagggggccttttttttcccagttcccagagagcccatgtgggattaattcctgtcacccatggagataactggcctgagattctaatttgtactattcttccttcacgagtttatctgtgtctttattgctttcctccccatcaaaacaagccatgtgtagctgaatctttgccggattcaagtctctccccggagaatgcaaacaaaggcgcaagtgcatttcttctttttctcatttgctgttgagacgttttaaagccctgccaagtttcattctgcacacaaacccaagcttggcttttgaaaggtaggcaatgaaaaagttcatgcctgaagacagacattccacaattacaataggtaacctagaaagtgcccagctctggggaattgtcttgggctcctttgaatggtaatcccaaaggggctagtttgcctttgatgattatctataatttcattattttatgagattagctgctgtggaactcttttatggaaagagatttaagaaagtcaactagatatacatctgccacacatggaatcttatcttaaaagtgggatttccccttcagctcagaatgctgacaggtttttttttttttcttctctaatggggttcagcgggttgaccagaagccaggatgaaagacagatggaagtgcaaagactggctagctcaggtcccatgagtctccaacctttgctcagctctcctattaaaatcatcttcttccaggcagacacaggcctgtcactctcagcctgtcatcaacacagctaggagaagcccatgtggcttctaagctgagtcagcagaaattctcatggaatgggttttcacatagaaaaccctgtcttgaaaaacaaacaaacactggagactcaatttatctgtagagacagtatttggaagccacttctttgacactgggttatatttggctaatacagtgtaaggacttcaatcccatccaggtctctgcctaccccaggaggccccaggaaggaagcagccaaccagaaggggaagtgtcaccctggtttgggctcccttgaacctgtgtctctgttagtgggaaatgttgacatcactctgtatgatctacttcatgcaagactgttcttttattccccctatttaggtcaatatctaagatacaggaaaagcatttttaacttccaaattggcctgagatgcaaaattagtgctggaaattagttcattatacttttaaccaagtcaggaatggctagggaactgcaaatgatcaacatctgctttataatgtgtcctgaccaagttctcaacctgtgggtcacttattatccctttgggggatccctttccacaggggttgcctaagaccatcagaatccacagatgcttacataatgattcataacagtagcaaggtaatagttatgaaatagcaacgaaaataatgttatggttgggggtcaccacaccctgaggagctgtgttaaagggtcatagtgtttggaaagttcagaacaatggctgtacacactcttctcccccccaccccgccccttccttctatattgcaacccacatttcctggaatttgatggtataaaccagaacttagggagagccaaaggagacctcttaactctgtctcatttggattgcatgtgccttgccactggcttctagagtggctttaattgcaccttctgtggcatcagaccctatgatagtatctattctcaccttggcttcacttctcaggaaacatacagttgccaaaatcctcccaaatgcctccagggagcagggaacctaactctccgcctttggtctctcccttttgctctgtttcagtcctgacaaaagccagagttgtttttgaaggctcacctaaggtctttctcagttttacaatgtactgcttgcctggttccaactgagtttgaacaaagggtctcatgttgatttgaattacaggggcaaactttatttgaactacaggggcacaccaacacactcctatttcccagggcaggtcagcattggcattttcatttccaggaggaagggatcagctggaaacttacccttttcactttctgacatctccttctctgttttggcttaagcaaaggcactctgtattgtagaatatttgtacactgtgtgaagatgtgttgctgtgattggtataataagaagctgaatggccaatagctaggcagaagagataggtaggacttccgggcagacagaggaagaggagataattgaggcatgtgggggacaccaatggaacacatcaaacatatgggacagaggaaaggtaaccaagccatatgctagaacataggttaatagaaaaggttaattaagttataagagctagttagaaacaagcctaagctaaggccaagttttcataattaacaagtttctgtgtcattatttgggagctggtggcccaaaagaaagtctaactatgcccttaggctcagactgccttatgctactcagctttacaaacaagtggagttattttcagccagaccttatatctgtcatctttgcagtgttgagggtgtgagagagaagcccctggggatttatactctgtcactgatagcttgtcctccactggaaaggatgggagaaaggatagcttgtgttcaagagtgaagatccaggctctgtttctaaggcagccctctgtctctcttgccttgctctgcctgctgcttggcaggatggctcctttcttttggctgatctgctgtctgaagcctcaaggcccactgcctgtatgacctgcagtggtacctcactggagccctgtgtggcaagtaggtcttgctggttggccgagataacactgtagttgggtcgctcttttcccctcaggatgtcttcttcctacttgccaaaactacccaggtagcccattcctggtttctagttttgggtgtcagagctggagggaaggaggaggaggtgttgggaaattaaagtctgagggtaaaatgatatcctgtgaggaacatggcaggatcaggaagcctgtttcatagcgatagtcactttaccaagtgtcctgcccatgtgccagtgtaaacacagaagtaaatgaccaccttaagtctgtttagttaaatggggacagatttgcttggttcaatctaacacaattgactgcaattccttagcttcctgttatgggttaattaggagttaggtataagctttggtgtagacactgagttgcctgtggtagaacagaaggttgaatgtctttagataaggaaccacaagtctaatagtcactttataaggtgtgactatgtggagtccttattgctaggcaccttattggcacaatagcaagacacaaatagctggaatggttagcacccagcccagcttgcttcatctcatttttatatccaggcatgtagaactggaggggcagcctacccaggaagactttcttgtgttggaagatttggttagagtaggcatcatgtcaggtacaccgggcgtttgggagctgcattggaagaagccttccttgagagaggcaggagcagagagcaggactggggtgaatgggcccacagcttctctaaagatcagccagataattggttttgcacagaagctttctacagacctagtgttgtgtgccctttttatgagcatttacgtctcagcctggcagtcagtcaactgtatggcaccttgccttgctctttctctgtgttctcagtctcagacagaacatctccagtggaaacaaaggatgtagagcaggttcaagtctcttttatttaaatagtgtgtgtgtgtgtgtgtgtgtgtgtgtgtgtgtgtgtgtgtgtgtgtgtgtgtttaggtgtgtgcatcaggtaccatagtgctaagcttcaaacccaggacaaatggctgaggtgcctatttaatctatcaaagtggacccagccaccaggttctcccagcatccctcagtccctagctattacagtatatggctaacatatcctgtcctctacctcgaattctccagcccagttcttctgctcccttctgtctgcccaacagttctttctaagtctcacctgctaccagttctgctcacaggatacatctctcctgtcctgacgttgtgacagggtcctgatgttgctaatgcctgatgggctcattctcttctgttcttccatctccgaggtaacagattcccatattaaactgctctgtttgatatacctggagatgctgctgcttccctgccggactctgaatgacatggatgctttctttatagatggatgttagattaagacacagtattaccaagttgtgcaggatttggttttatcctgtttataaacagtgcagcaaaagcaaaataattaaaaaaatgaaatggttgaaagcaaaaagttaggggacatgtatgagcatataaatatataaaatcttgggcaaataatgcaagaatcaaggtaataaaatgttaaatagatgagttttattgcaagactagagaaggatgattaaatggtgattcagcattcttgagtatattcaaatgagcaacatttggcttctgcttctgtttaaatgatgctgtgttttgattgtggtctgaagctttgaagcactacttggcatctccttccttccttggaggtctcaccattcagacataacatttgatgacatgttggtaaggtgaggtcttgcttgtctccactaggtcatcttcatatgaatccagtggttataggactttgtttaaggggcattctttcatttatttaataacagtttttagttgatgttcatggagagaatgaatccttagaagtgtgccgctagtgaaaggaaatcctatctaagagtgtgtttctttacagagctgtgtcataccatcctttgggccctctgctggaaaagtagaatcaagtctcaaataatgccttcaaattgtatcctctagcattatagatgtaggacactactgtgtcataactctgtgaatgtaaaatggctcataccagctttatgatacatagtagtgaccgtgctttatcagagctgtttttaatgatgttgctcagaatggtttccttccagatgatgattgagaagctaatttaaaaaaaaaaaaatggtgccaggtaccacaagagtaacagaactgtgctgttttctgggattttgttttttactttttttttttttgttttgtttttttaaatggagtgtgctggatgtctctacaattttgttcaaatgactgcagaacctggaaaagctgttgctgctattgatgcataacatactgctattattggtctttttatataaatataaatatatatatatacatatataatttgatttctggaaactttagctgtgctgtcaactttgaaaaaaagtatcccagtttaccgtgttgagttggcattgtacagaaatgaacagccatattggtctagaaatgttgaacttaatttttttccatttgtacaggggtaacacactgtattaaatatgtaagatcttatctacatgggtttgattacaaaaactaataaagtattctctaaataaaaaaaaatgttaaatagagcaaaggtgatcatctatttgtgttcaatagccaatcatgaaaatttaaaataaaacagcatcaaaatagataaaggaatgattatttaatgttaaaaatgtcagaactctgttcaggtttgaaatctcactgcaattctaacttttaacaggtcaagagaatggtggggtctgggggtggggggaaatcccagcaacaatgaataatgacttggcctgaaaaaacaaagaaatttactggagttagttgactctggcgtgtgtctgttgggagctttgaactcctccatcttggaggaagtaggcagtatggtttggctagaagctgccagttctgaaaagggttgtttttattcagggaggggagtgactttctggggccaggctgcagtcagggactagccccaggattccccagcatggacacccctcccccacatgcagtccatttagaaagtgaaagggtaaattcggtgatgagataagggaaatgaattagcacaccaataggaaaataagtaatgtgagaattatcggtctgcagagacagatctgaatttgaaaggcctgctggggtggggggcatgggtgggggtgggtgggcgacgcacagaagctgaacagaaaggttttgttcagtcaaggtttctatccagggcagcagctcttttggggggcagggggtaggggtggggaggtagttgttcagaaaggtcatttcttttcccacgtggaggaaatccttgtgaaataacagaaagaatataaccactcttccctctctcttcctcccccttctttctctctttctctctcttttcaccctttatgggttaagcaccttgaaaactcttgaccattctacgaataatgagagataccccttaaatattagaccacagtatcccacacgcagcactgtggcttacccatgtccaactccagcgccttcctcaagtctgtccttgccatgggaagagaaaggtttgacagggcaacaattgggaggcaggacctagctagatgaggaagcctgggctgagtttgtaagtcttctggatccattttggtgtcactaccgctgtgccttcggaaagtaagaagcagacatccctgtgaccatgtctcttctaattgcactttaagaactccctttccttcttccaacccatgcctgtcctgcagacacctcaaactttaagttaacaaggctggagtgtctggaaagttttcctagaacaagctaaggataaaacccgagatatttgatgtagaagagactccacatgctacttgtcttagtccatttgggctgctgtaaacacagactcatagacaacagaaatgtatttcttaggctgtggaagtagctcagtaggcaaaagttctttccatgcaagtttaaggacctgagttcaaatccccggaacccctgtaacctctgtaatgccagcattcttaaggagtgggcaggaggtggagacaggagatccccagaaacctcatgagccagctatcctggtagacaatggaaaaatgacaaggggagactgtccctaactgtggcgtgtgaaaacccgcccctgaggctgttccctgctgtctgcatgtatgttcacattcacatacatgaacacatgggtacatacacataatgcctccttgcctgaccttttaaaaaagaaatctatttttcacagttctggaggatgggaggtctgtgatcaaggaacttgcagactcaagggcctacttcctggttcaaatatggctctgtcttgctggatccttgcatgaaagaacttcaggcagttttctgcagcatcttttgtgagggcacctgtagggagtcaccctagccccgcccaatagtcctggggcaggtaccaggtggatccggggactcgtccagaagggcatggtgaaggaaagccggggtgacataagggagcttcttaaggggctgcacatggggacccgggggctcttttgttctggctgcgctggctgggttctataacctagctctggcccgtgtttcaccttgctgtcttctgaaataaagagaccttaatccaataggcaccagtcccattcaggagggcctgaatcatacaaccttcccattattgactttatctcaatatgtagatgggggaggggtttttaagaatacttaatacttaagcttggaaggtcctacggctggcgagggacaaataagggacaaataggcagaacttatatggtaagggagttttattagggaagggagtaggggaagggagggaaagaggggagagagaagagacagagagacagacagagatctgtctgcctcctcagagaaatggcagaaagactgagcaggagtgggcagagcttgtctgttttttttttcttttttatattaatttattttttacattccaatcctagttccccctttctcctctcctcctcccccatctcctatctgctcctcagagagggtaaggcctcccctaggaagtttactaagtctgtcctatcatcttgttgaggcaggactaaggtacctctccaccccccacacccctgtgtctaggctgagcaaggtatctctccatatacaatggactccactaagtcagtttgtgcattagtgttaggttttagacccacagagcttgtctgttaaaggaacatttgcacctgcatacagagtgcaggtgtggcactcccacaggtccccaaggggcggggccaaggtgtgcctggatgctaacaggggttacaagcattcagatcctatcactgctcctgaacacagttagtggttgttctaaaacagtacagaggacctccgtgtacagagcaagtctagaaaatgatgaaacaaaggtgggccatgtcttgattccttcactttcaatagctttcaaggtcccttgtgattttccagcaaaggataacagaatgtacactattccccatgcttatttgggcaagacccccccattccaggcacagtctttgtgagctactgggacatgggttcattggaacccactcagagacatctgcttaagtcagtaacagaaaagctttggattctttgctgctggtattatgtcaacttgacacaagctcgagtacactgagaggaaggggcctcaactgaaaaaatgtaccctataagatcaggctgcaggcctgtaggtcgttttgttaattagtgattgatatgggaaggcccagcccattgtgggtggagccacaaatgggggggcgattctgggttctataagaaagcaggctgagcaagcaagtcatgaaataagccagtaagcagctcctctccatggtctctgcattagtgcctgcaatgatacaagtctttgcacaaatctttactattcatttattttgggaactagtttctctggggtggagctatggagtctgtgaaagagcatttttttttctccattttttatttgaattagaaacaagtttgttttacatgtcaatcccagtttcctctccctcccctcctctcctcccctccccccaactaacaccctacctatccctttctatacctacctataccctttctgctccccagggaggttgaggccttccatagggggtcttgagagtctgtcatatcctttgggatagggcctaggcccactccagtgtgtctaggctcagggagtatccctctatgtggaatagactcccaaagtccattcctatgctagggataagtactgatctactacaagaggccccatagatttccaaggtctcctcactgacaccctcgttcatggggtctcgatcagtcccaagctggtttcccagctatcagtctggggatcaagagctctcccttgttcaggtcagctgtttctgggggtttcaccagcctggtctggacccctttggtgaaagagcattttaaaaaatctattctgtcttttttttccattcaaatgtgcttccctttggtagctgtcctaggatgtcattaagtgtttcaatgcctgtttgaagacagccaaaacggtgtggaatccacatttggtggccatattttcatccttaggctctcttagagctacacagctgtgagtgtaagtttctctgggcaagactgtggcttagtcatctttgtaccctaacctgaccaggctgaccttccgagctcagtgactgatgattaaatggtactaaattcagcagatggctagcatgtaataggttctttactgtcacccaacttgccaagttgttcattcattaaagagttattgaagatgccatgctgggcacaggtgctgggaactgacaggggcaaatgcaacacatgtggcctcatcactctagcaagttcagcctccaccccgcccccaacccctcgacagaagatcttggtctcagctctgaatgccttgagaaggggttttgggtaaagctgatctgacctgtgtactgtgtgattacagggaaggcttcactcagatattttaatcaccgcctgcctcactgatgtctgtcattctgcggcagatcttgtttcagagtcggagatgacagatcaaacccttgccatgccgttagataaccgtatcccgtgtcaaagaaccccaagctatgttgtgaaagcctggatgtgagaacaggacactttgacgcaacaggatggggagggtttccaaatccccctggagcagaaaatccctatgtgatcctattgagtatcataaagccacctgctgggggcatggatgctaggggcaggatgtctggccaattcaggcaagatctagttctgagctttcaacttgtgtctgagaaaatgtttctgaatgttctatgttccccacttggctgttgctggaaaatttgataaagggaatagaagctgggcaaatagttctgaaaagggtgtggaaagcttggttttgcaaccatttccttaaatctgtgtaatttattgaaaaccaatggcaggtctaccatgaagtctcctatagtgctggcttagcttgtatccagctaagggcgaagactgctaacatagccctcttgtagtcttccaatgactattttgtgtgaaaactcttagaacacacttaggtttctgaggctccacactgagtgcctgagcaatgactcagggttcttggtaagactgctgtggatttcctttcccaatgttgctgtgagctctccaaatttggttgaacaagtagacacttctgttattgtgcatcctggtacagtcacatgtccagttcaattagaacagctgcacttgactttgtggacagatgcaatctggaaatattgattacagggtttgtattactttgaccaggaagatgttatctgcctcagaccctcaaccaatgattatcctgggtttgaggactctttctgtgtttcagagaatgctaattatcagtaataaagcatcacttgggagatgggaccacatgggatgctattatttcacatgtatatatatttattatttgggacatgtttgttttcagccactcatagatggtttcattatcttaattttataccagtgagcaaattgtttcaaatatttacatttcaccttctatttcaaacgtggctgtatcttttcctttgcctctgttgactggctttcaggcagacacgctaatgtctgtttcccctgagccaaggtcacatatcatgtttcagctgcaagctaacagcctgtcaggaggagtatggaaatctgtatctggggtttgtgattaggcatggaatcaggatggcgagggggccctgctagaggaaactctgctttgagtgtctccgccttaatgttaattcagagcagctgcaggagtctagggtgtcttggaagtttctgtctctgtccttcacatcctgtgatttcatatgcacataatttcaaggatacttagggaatttctgtgagtatttatgttttatagaatgttccccataactcagatttcatgcatagaatcatttcatgcatacctggggatggcttctttttgtgctgtcttccactctcatgcttagaaacacagccacatatgagcttggcatggagcagagtgatagctagtgtgatactgtattgaatgctattttcatctgtaacttactaggtaggacaaacttattgatctttcagtcttttgttttcttcaaatgcaaaattgagagggaaccaggcacgcatgtgttgtacatggatacatgcaagcaaaacacatatcacatggtataaaataaatacatgcttttttagtctctgtaataatgatggttctagtgatgactcatagctcagtctgtgttgggggctgctctcactgcttttaaggtattactttgtctagtctttatagcaataccactgtaatccttctaacttggtgcatttactggagcagacactgggtattctactagcatacctcctactggaagataccaaagctaggatgttccctctcaattttgcatgtacaacacatgcgtgtctggtgcccgtggaggccagaagaggccatcagatcccctgggactggagttacaggtgattgtaagtcaccttgtggattctgggaatcgaacttgggtcctctggaagaatggccactactcttaacctcggagccattcagcccctactacagagattttgggaaaagattgattccccatttctgacgtgggtcagagttcaagttaaaccagggggatacctaatgtgggaggttaattttttgggtacagcttctgaactataagcacactcatctcttttctgtacttcctagtatgtgtacattaggtctaaataccattgtcttttataatcaaaagtgcagcccgatagaaggctgaaaactttcatgtgactagtcttgcctagtttgaaagttcttttctttaaatcaaagatgtctctaatctgagattagagtcatcctcgtaataggcatcaattatttacagttttcaggaaagagccctcagcaaccagcaaccagcaaccagcaaccagacctctttcaaaggcaccagccctgactttcccctaaccagagtgaattagggcagtgtgatattcaaacaaacaacctaaggcaaaggcaaggggtgccaaattatacttccagttcccatggagtacttaaagaaaacccattcaaggatcctggccattgcctaagatccacctattccctccatttctttgcacctaggggctccacatagcctgtgctttccactttctttttcctgtctgacacaccattttctattttattttattggcttctattttttaccctctctccccttctcctggttctgaagcctaggagccaactaatcaggcaccccaggggatgaaattagtaagatgtggtctcctgagagggaaggcagaggggagaagctgaccaagcaaagaagaaccatctgtgttaggaagtggaggctttaaggacttcggagtaaggttgaacatgttcaaataataataaattttgcctctgtcacacaagcatttttacaaagagcacaggatttgatgaagctattaaagttctttcattacttagcaggggtcaaattttctgaaagaggtcacctgtccccagttctcaagccaccagcaatggagtatattgtatgttcagagaaagctcaaataatacatttagaatcttctagaattacgttctgtcagccagaaggacaaagtctacccttaaggatctgtgtctgtcccatgggaggatgctgacccgtttgcctggaccctatgctacagttttcagaatccccttcttggagtagctgatgaggcggctggtaagaagggcattgttggggaaagtgcagcttgggtttgatctgtgctcgatgcagagtgcaatattttccacaccagagatgagacggatggaggccagtgccaggctaaaacctgccctgtgtactccatggcttggtgctgccagggctcctatgagttgcttgcaggtcatgcactatgcctcaggaaacctagcttatttttatcatctgtagagtttttaaagctttgctttaaaaagcccctgtctttgtatagaacccctgttgacagtggaatgtggcttttctgatatcgcatatgtacatctgtgtgaacatgtgtatatatgttcttaggcacatgcatggagttttaatttgttttctaaacaaacaagaatgaggtcatagtcactctttgatctgaagctcaccggttaccctttgcagtctgccatggaggtgcgtgtcagaacatgaaaatataacagctgtttgatttcactgcactgggatggcatcctgtatgcaagaattcctttattttttggacatggaggcagctcccagtgttttcattctacccacaatagtgcagtgattgtttgggtatctatacatcatttttacacatgtactatttgatttctaagattgtaatttctggatcaaagagtgcttttgaattttaactgctgctgttacatctgtgtattttaaaaacaaaacaaagatacaaaaagtcctaatcaaatttagctgccaccccctttgctctttattggggtgaattctcaactccaacatccccagaatcttactacatacaaatagatgctgcccagtctccagacttatttaggcctgttccaaacaagattgctgggagagagctgatttaagctcctcccagtgtcgctttgattagtaaacagatccattaacctccctggaaggttcttttgagacattcaagctgtgaatttttctttcagagcctttcaaagctgagaaccgctgctgagcaaagccctatctaggccagattgtgtttattttgtccaattcaaatcagtttgatggctgtgtgtttatgcatactcttaagggctctgcagtgattgacctattggctggggaacagatttggttttaatcaagttccaagtctgatgggatatcactcacgtggtagccatctttcagctgaaggccatgttttgctcactgatccctgtaaaaatcaggtccataaataaaatggagagtctggaaaagatgctggattggtttgtttcagccttctgcttactgagggatcagggcccaacggaggagggagtaggggtccttggtgtcttgttactgtactcaacagagcaaggctgcagatcgcctgggacctccctctgtacaatacaaatagtctgtcctcatgcaaagagccaagaccctaagtggatgcttgaagctgcagagagtgtgatccccctaaatcgactgtttctttctatacacatacacctacgataaggtttagcttgtacatttggctcagtaaaagattagcaatccaatccaataatggaatacaataatgcaagcaaacagcactactcaagcacttgggggtctttattaactaagtatcaggcacttgctctgaggtactgcagcaatcaggctgaagcccacagggttatacagtagcaatgagtgggtagtgagtacagtgtggatacactaggtaaagggatgggtcacattctggatggggtttaaggggaatagttcaagactgaatgccactcgaagggtcatacaattgaaaacgtctatattacttcatgagttttctacatcacatctgtggatggtggccgatcctgggtacctgaaactgtgaggaagagttaagggcgactatataccactcaagagtccccaagacagtggtcctcaacctgttggttgtgaccccttctccaaaaatattcacattatggttcataacactagcaaaattgcagttatgaagtagcaacaaaaataattttatgtttgggggtcaccacaacatgaggaactgtattaaagggttgaagtattaggaaggttgagaaccacagtcctaagagatacttaaggaaacattccttatttagcccagctgtcaaagagcacatctgaaatctacttaaggcaacacaggttaagatttcagattttacatgaataggttactttcaggcccaggatataatccctgtgtgcaaattcagtcaaaagttgtgaagtctgcttttagaatttgtatatccctgacaaggtgactataacttacaaatgaattctcttagtacttatagttaaggtgctagagggtgggattaatacggttttaaaaacaaactggaactaattgaaaatgatctctgctgggtgcagtggcatacagcagccagcagtcttagcacttgtgaggcttatataagaggtcttgagaatgaggccatcttgcagttcacagttagactcatctcagagaagagaagaggagaaaggatgagtaactgtaatgataacttcctgccagccatcagagtctgcctgctatgtcacttcctgcctggatcacaagacttctctttactacgtttcccagaattctcctcgactcctagccccacctattttgctcccctattgaccaacagtgctttatttatcaaccaataagacaaacatacacagaaggacctcctgcatcatctcctcttttctgtctaaataaaaagaagggttttaacctaaacatagtaaaatatataacgaaacaattatcaagtaagaactatagttacaatatttagtccattaacatttaaagaaaatattctatcatctatcctatctttgtgagtctaagattttatatgtagcttatattttataataactaaagaaaactataaccataagtatctgtcttcaattccatcaaagaccacagaaggataatatataaactctagaaccgacagagacatctcgatacctggacagtcacccaaagttcctctgtaatgttggggcatccatcttcagcctataggccacagtgtgtctggcagacttctccatgaagcaggaacccttcaggaatgtcttgttttgcaagttcagcagtcactttcctgtggtttctgcatgtccagtttatcaaacagtccaggcaagagcaataccttgcccaaatggctgatcttgccatgctgaaggcaaactccatattgagtttcttcaatgcccatcctcatttctggcataattggtgtgccaggagaagttgtgtctcactgtcatgaaaaaccctaaaccatttaaaattccatatattctgtaggtctttgaaaggtttgaagaatatctatccatcccaaatacatctttgtatatctagaaaacctaactaacctaactataagttctggctattataagtgactacataatatgtatttaattatgcattacattttaaaagatctgtataaacacaataccttaacaagaggagaaatatacatatcacgaaattgaccttaaagttgtatcaataaatgaaaatccataccaatgtaaactattcatttttatatcctattccctttttttcctttaaaaagagattgactgtgatcattaccatttataaccaaccccatttaaatgaaaacaaacatttataaacaatatttgggagtttgggcgttgttcactccaaactgcttcctgcttgttgggggcgatgtccatactatggggatcatgataaaacatagaaaccctgggtgtagtggtctatgactgcatcatctcagctgttttggatgtgggatcaattgggccactgcttcagggggtctaacttcatcaaaccatattagtctggaaggaatccatagctttccatttttgtggcaacacaagcaaaaactcttttcccaagtaacctgtccttatatttaaatttagaagtcaaaacatttttaaaatatataagttggattaatttagcagcacctataatcaaatgtattttagcagctatagctctttccttggcaatcaaacaatttaaagacaacagtataacatatggtatccagactctgtgagtattttccatttttccatggcttattattattattattattattttattattattattttatttcttttacttcctttttttctgagtcagggtttctctgtggaaatccacctgcctctgctgggattaaaggcatgtgccaccacacccagctactttatttcttcttcttctcctcctcccccttctcctccccctcctcctccccctcttcctcttctctcctcctcctcctccctcctcctcctcctctcctccttcctcctcctccttcctcctcctctcctcctcctcctcctcctcctcctcctcctcctcctcctcctcctctctcttccttcttcttcttcttcttcttcttcttcttcttcttcttcttcttcttcttcttcttcttcttcttcttcaccttatcccctttctttttctctcacaagcctacatatatttttaaacacactgtaaacccttagagatttttcttcatctgaatctgtctttactgtaaatctttaacctttttctggccactcgatcttttatctgctaaacagcattgctaacagagccttgtggggtttttgccacttatgctgagtcaggaagcctctcttaaaggaaccacgagcctctgcttgtctctagcaaaacagaacccacctgagaaaatgctgctaccaagaagtcaataaatctttctgccaagccacccgagcctagccgccacattaggacccaagaagaacacacagagattaatattaggacctctcccatcaagtaacctttgtcctgacaccccccatagtcatctcaagtgggagaggagtacagtcaccatcccactgagtccttttctacttctggcctctgtgtgggctgtttctgctgcctgtactgctcctctcaaagcttctccatgtcaacatgcatgtcacctctttagagtggcctccctcaaccactctccctaagagagcctctaagtgctactctttatctcagtctcttggaaatcctaaagtaattttaacagcttttgggatcactcacacaccatctgattgtacacatgaagctcattctccatattcacagacttggggcaaccattgccaatattttaggcatcatgattttacaaagacatcctgttccctttgactgtcattgctccactgcctattacttctccatccctaagtacccatgagtctactctttctaactttcctgattgattggagaatctcatatgaatggactcatgttatatgaggacttttgaatctgtcttcttttttttttttttctcacacaagagatttattgggagggaaaaaaacccaggaggctggctacctctgctcaggtgagaaacagcagagaactcaacagaatacagtgcttatacagtttcttggggacggggtgaaacttttcagtgtgaagctttccaggtggagattggtggaatttcatgcccagaaatagggcttttcactctgttgaatctcttttttttaatgttcataatattatggcatgcatcagtatttgatggcgttccattgtgtgtgtgtatgagagagagagagagagagagagagagagagagagagagagagagagagggagagagagcgcacgagcgagcacatgtgagcctgccccatttggcttctccttctctccattgatgaatatctgagtggttattgtgaacaatgatgacaagtcttgattatgcacctgagtagactcactgggttccttgtagattttgtgacttgtgtaatgcatcttccattagattataaacttggtaaaggtgaaaaccccatctgacttgtcactgtcatagtttctatacttaatgactagttaatatacaatgaatctgccaggcatcagatacatgctaatagtctatatccaagtgctctgaagaagattgtgtcagaaatgctgaccccagtgctagcatctacacatttttgaaggctttaatcctgccacacgcctgctgattttatcctaagtgacttacttccctcacaacgagactctagctttgatcataatgattagtctagagtgggaatggacctactgtaccttttgagatagagagaaaaaaaatctgcccaaatagagaatttgaaccctgtacgagtcttatttttaattaccttgaatttagtaatctgactatttttgttactgttctattggtgtgatggaacaccacgaccaagacaacttatagaaggaggcattgaattggaggcttgcttacagtttcagagagtgagtccgtgatcatcacggtggaaaatgtgggggcgggcaagcaggcatggtgctggcagctcacatctgatctgtatattgcaggcagagagagagagagagagagagagagagagagagagagagagagagagagagagagagagagagaggagggagagggagaacaatactaactgggaatggccttggcttttgaaatctcaaagcccactccgagtgacacacctcctccaacaataccacacttccgaattcttactaaatagttcaccaactgggaaccaaacattcaaatatatgagcctataggagccattctcattgaaactactacactatgcaagcactagggagaaaaggctagagctttttaaaggtcatgatgtaaacggaaactggtggagtgatgatggttatgaatgaagttacaggaaacagagtgttgagaaggcaaaacctggagggtaaaaagtgttcacatttataaaggaagacaccaggccaatgggaaggaatgcctaggtcaaggtggtgatgacaaggccaaagaagagctgcgtatgactcccgagatcctgaactacataaagtcttcttgaggctcggctgtgcagccttccccaggtgtctaagatgctgtggttttatgattgaattgtcattgtctggttcttccctgtgttcccccaccacttcccccactaagttcaccttaaccacctgaagccactgtggatgagacttcatcccatgaatctagaaaagatgatttaaacacttttattattaaccatattttacagaaaatgaagactcaagatcatgtcatagtaggtagaggtgctggaatgcaggtcgaggcttacctaatttcaaggtttttgccctataccatgctctcagatattttagttatggcaggaacacacagctcagctaagtgagccagcttggagctatgtatccactcatctgcatcaatgaatttcttcacaaaaataagaaaataatttgcatttacatagagcctgctcctacttagtgatagtaataagacctgcactatagacaaagtgtctgcaggacacacccagcctcattgtctcctcttttctgtgacttgcaaattaatgtccctctgctgcataggttaattgagactcatttttctacatttaccaattttctcctcttgtttcatttcctccgggtttatactgaaggcagaggctctgataaagggcattgttcgtggagaaaaggaagctgaggagcttccatgaaatgatatgtcttaaagagaaagggtttcacaccaatgccagggattctagtgcaaggttaacagtctgcagagttgctgagtgtctttctgaatgtgttactcttttctttctttctttctttttttttttcagttttttgagacaaggtttctctgtgtagctttggagcctatcctggcacttgctctggagaccaagctggccttgaactcacagagatctgtctgcctctgcctcccgagtgctgggattaaaggcatttgccaccaccgcctggccctgaacctgttattcttgatacacattacttcgtcactgaatttctaaagaacagtattgcttttaatagctatgagagatctctaggcatctcaatgctagagatattttttaaaggaacatacatacatatggacacacacataccatatatgcatactaaaattattttatagaaattctaacagtttctttcaagaggtaaaacttataaccttgaaaatttgcttctgaattatgttactaatgtttaaaaacttgggaatttcatatgaaagttccaactggtgtattatttaaaaattgcagccctaatgctactaggatttcagtctcctataattcagcaatatttgtctgaaccctttagactttgaaagaataaaaaagagagtacataattcctcaggaaaaaaaaaagtcaacagcttagatgaaatgagccaattctttgaagactacaagttgccaacactaacccaaggtgagattggtaattgggatagttctataactatcttgattgacaaagaataggattgaggatgggacttcgtgttagtgtgcgggttagcatggatgaagaagggcctgtgtttggtcctcagcatcataaaggaaaaaaaatcacagaaaatgaagaacaaaagggagagaaagtaaaggaagaggaaaggggaggaaaaagatcacccttactggaggaagagagggaagaaggaggctgctagaacaaccatgtttttttgatggctaaaaagcatcatggtgatggtaaaagaattgctgagtaaaacaggacagagactcagaaataaacctaaataaacatgactagctgattttttgacaatggtgctaaagtaattcataggacaaagcactggtgtttccaggagaatggaagagttaacacagctattcaactaaaaattatatggacaatttgagtagacacttcactagagaggatacatggatctcaaataagtacatagaaagatattcaactctgttagcctatagggaacacaagttaaaactatgacagaagaaggagaatatcaaaatataagaattagtgttgataccaggccaagtactgatgaatctacacatcattgggacttgtatccagtatggcctttgtgggagtgcaaatagaacagaaaggcactctgggaaatagtttgccaaatgcatatgaagttaaacagatgcttaccacatgaccctgtaatccactcccgtgtatatgccccgagaattaaatcatatattcacataaaacctgtatacaaatatttataatagctcatccataataactctgagctggaaagagctagaagccatttaataggtgaaggagtaaacaaacgggtatgtccatacaatgttccacaatagaactgaactaatgcccaagctggatgaaccttaagggactttgctcagcaaaaaggacctgactcaaatgttacagactgtatgagttcatttattttgtgttcaaacagacaaaactataaggcaaacagagcagtgctggagatgggacagctgtggcttctcaatgacttttcttgggtggttagaagtgctccctaccctgattgtggtcctggctgggtgaatctactcatgtttaaaactgataagaagagaacacaccaaaaaggcaatttcactgtggattatttaagaaaaacaaacaacaaacacggggctggctaaatgacttagtagagaaaggtgcttgctgccaagcccaaagaccatgtgtgttgtgtcatgtgcatgtgtacacacacagacacatagacacacacacacacacacacacacacacacacacacacacatgttctctctccctcccccctctctctctctcaataaatgtaaaaaatgcatttaaaagtgcaatatattttaaaatctttgctcagaatgctaatgtgctgtccaggctgcatccttgcttctttgggcaaataccaaggatggtcctctttaaaaggagagtttcagaagatttcttaaaagttgaacctattctgaggaatcactgtctatagtaagagacaggcagttgtttcaaagcaagagcagtagggaatctgaaaatgtaccatgctgccaagttaaacagaaaacacaaatatttgtatagctttgtaacaaaagagaaatatgggttttggcagaagggccttaatggtacttgtggctttaaaataaccaagccttgctcccattatgtggaaatcacatgcagatgtaggtatgtcagagaccatggtgctatcccagggagagaagcccagactgacaagcagggcaatccatctctttgtgaagatgtggcaaagcacaatggctcttagcattggctctggaagggctgtgtgctctgcttagcagagttgggtggatcacattgctgcatgggttcgtgattgtctgtttccagctgcagagacagaatcttaagattttagttcagagaccatgtgtttgtgtatcaaaggcagtactggacaatttggggtgactgtgggtatactgaggggatggtggtttccagcacccctctcatctaaatgcaaagccctagccatcctctgtgcttcccaaagggagccatctaacaccaacttccctttgcagtggattggattaaatacttagatatttatggctattggatcaggaagaagagttcaggtagcattatttggatgcaagtaataagatcaattttaggtgacttaaaagggaatgtgatgaaagcataaaaagccatcatcaatggaacaagctataaaacaaaaagtggccggaaccatggctggcagccttcctgactagagaagggagattatacattaaccctattttcaccttaatacagcatcttctcagagtaggtcctgtcacatgtccactctttttgtatgggaaaggagagattgtgttgagtgacaggtagtggtcaaaggagattctatagaagtaactaggcatttcatttctcaggcagaagttgggattggtcagggagaaacaatagctcccaggaatcattgtggggtttagacattcctatggagtgtttggataaataggagttgggaacagggaggtgagatgagagtgttgggtgtcatgggagaaaaaaagcattggcctaggaactatatgtggatgagattttcctgctggaagctgatagaagatttcaagggaagttgctctttcctgacctttctgcttttctcactgaatgatagaaggaccttaagacccctgcttgctttggatatggcttgagtgtgatccccagagtttcatgtgttagaagcttggtcccaagtgtgaacagcattgaggtggttcagcgttcgagagctgaggcctgatggaatgtagttactccactaggtcaccagccttggaagggattgttaaagatctgtagacagcaataggtcctatgggagtgagtgagtcactgtaggaagcatacaactttccctgaacctctcttctacacattctactacattttcacaagaatttgatcatttggcccaaagtgagcatcaatcagatcaattcagagtcttgaccaactaaaagtgaatgatcacagtggggaagataggttagatgagaacataatttatgttctcagtgcagcccattgagagagttacgatttgaagcattgccatgcctttggattgcgtctgcacccccatctttatgagttccaattttaggacagactttggatagaaaattttggttcctaacttctaacacagctaaggccttctagatataaagaactccttgtagtgtcatggtcctttgtcccatttctgtattctgtttaagatgaaattgtcctttaatcagatgcttaattggctctgtctgtaatagcatgcctacattcacatgtctgtgtttctgtgtaagtctgtatatgcttgtgtgtctgcgtgttcctacaaatgtgtctatgaatgcatttctgtgtgtgtgttcaacagagaaacaaaacacgggtgggagaaaagctctcttatgaaggccaatgcctagaaatgtttgttcttactttacttttcactttcccagtatgtgggaggagccctgcatagtctttggcttcatgaaatgttgacattcaggagaagaacggatgtgtttattcttcagagttaaaaggaaacaactgaggaagatgcattctgtcccacttggtcttgcgagtcctttgccagcaggatgaactttctaccttccctggtcaaccatccccgtagctcctgagcagcattcctctgtcccttctcttcagaagtgagaaggagaatggcattgtgatacttgaccatataaggggggagagaggcccagctatgattcagttcttccctcgtgtcaactgtacatacactggaggccttttaaggaaacatggtgcgtgcagggaaatcatccccaggcagtccatccattttctatgctactgcagaattggtgcctgcaggctctacgtgactctgaagtataaatcacaggagactgttggcaccaggatttggggggacaattcagagatcatgctctgtcctgaatgcgatcagcattgtgcttgctattaatgaaccgattcacagttgaatttctgacttttagtgaaaactttaccagtgccacatcctgaccttcactggggtgttaccctgtctgttatgaatgattatgatgtccacaaagacacagtccctccttcctacctcctttaggcttctgattggttgtatctgtgctattgtgcttacttctggagaaggatggagatagacagaggtagagatagatgagatagattatagataaatgataaacagacaggcagataaatagatataggtaggtaataaatagataatagacagatagatatagataaatggatggatggatggatggatggatggatggatggatggatagaatcgctttaagccatagacagttcctttagtggctccaagatcttagataagtcatgtaactctccaagactcaatgttctcaactaaaaatagagaaaatgaatgtgataaaatgcaaagtgtttagcacagagctggaaacaatgaaagcttgatgaatggtagctgttgttgttattgttggcattactgtcttagctggatgagagctatagatttggtgtctgtgggtagtatttcctgaaatcttgctgttctgatctagcatcattttgaccaagtgattttctttaagtgccaaacacattcataaatagtcttaggatccctgaagaatgtcttggcaggaccctgcatagccaactaggtgaggtggaccagggcctggctctctacccggccatctctcagtttatggagttggacaaactatctaatctcctggcaccttagttttgtagtctgtggtctggtgatgagagttgtttaaatccatgtattttggttgccaggggcggaaacaaatcaaatcagaggaagggcaaaaagaaatgattcactgcaaaactgtagggatttctctgcaataaactaagtcttatttcacaagatggggaaggtggaagagaaagaggcatttcagaaggcagagctccttcttgtaggcaaatagatgacctacctaccccttcccctgccccgccaggctgcatccaatcctagactcttttctatcttgaaatccacgttcttaagttctatgcagcagcaaacaaaaggccaggttggcaggacaggcccaaaggacagtgtcttagggtttctattgctgtgaagagacactatgaccatgacaactcttttttttttttattattcctgttttttgagatagggtttctttgtgtagcctggaattcactctgtagaccaggctggcctcaaactcacagaaatcctcctggctctgtctcctaagagctgggattaaaggtgtgcgtcaacaccgcctggcttcatgacaactcttttatttttatttttattttattttattttattttattttattagttcaaattaggaacaagcttgcttcagatgtcaatcccttctccctctctctctccctcccctccccccaacatcccacctgcccctagccatccccctccattccccaggcagggtaaggccctcaaaaggggctccccaaagtctaccacatcatcctgggcatgacaactcttataaaggaaagtgtttaattgtggtagcttaattacagttcaaaggtttagtctattatcatcatagcaggaagcaaggcagtatgcaggcagacatggttctaaagcaggagctaaaagtccttacatcttgactcataggcaacgggaagtgatctaaaatactgggtgtggcttgagcatatatgagacctcaaagcctgcttccacagtgtcacacttcctccaacaagccacacctactccagaaaagtcacatctcctgatagtaccactccctttggggaccgttttctttcaaaccaccccagtcagataggtgatagtgtatgatgcccatgctcccctgttctgggacaagcacagtggtcatgatgttgtcctcagagcaaccggtagcaaagtcatccaggttcaaggatccatgcagaggcctgtcctaccagaggcttccacctagcacctgacagtcccatgctgacttccttaacaatggcactgctcaactgagaccctttttctgcctgaatctactagagatgcacagagccaactcgtgtaagtgaatttatagcacagtgccagcagagagctaaaagggtaacggtgacagggttgtcttgggggtgatttttcattctgatatcttagtctacttatctgtgttagcaaagtttcatagactggacatcctacagacaacagtaattcattccttaccttctttaaaagctgtagagtccaagattaaggtgccagcagattcaatgcacagtgagggcctacttcctgcctcttaggtgccagccccctccctgtattatgtatggaaaaggaacaaagcagctttctggcccctttacatgagcatgagtcccctcttcaagggctgtagtcctgctccagcacctcccaaaggcccccatctctagcacttgagggtgggatttaactatgaattctctttgaggtacagttaactccatagcccttagattccagaggagtgtccccagaagtgggagttaaagggtagttaagaatcagccagctgaaatgagggaagtggcgtcaccaagtcatagaggaccaaggcttggggacataaagatctggttgaggttgtgttttgccaacaaggacactgtttccatcaattgcaggcacagtgagggtaccctctgcttgggctctgctgtcacaatcctggggcttctgtgcagcctctctgggaagcaacggggcccagtaccatggctgctgaggatagggaggaggccagtcctgagtccacatagtcatttcttacaagttttcctgtcagatcaatatttatcaggctgtcaccaaagtgtggacacttttctttgatgccctcaatagcaccccctttcccactagagtgcaagtaaaactcttacttgcatttgtggaatagcgactgcatatcagagccatgacccatcctggcttcagcacacaaaggcatattggagaccatagaggcatgaaatgttgggtcagaatttgtgaccaggccttggtagctaagatgtgtaaggtcttttcactgtgctgacagcttccctacgtcagcccacaggaagacaggaaggaaggaaaaccagccctttatcagcatagattttgaatccaactcttacatgcatagtcctgattatcatatggtagactttctgggtggtacctatgtctgaacccctaaccccaaattattagctgatgatttattgcacagtttgtaatgtgcattggaattgttgctgtgaacgggtaggttcttttctgtggttactcagtcactgtcatttgcaatctccctttatctgtggccaaccatggtttgaaaacattaaatggagaatttcataaataaactgttcatagttttcaactgtatgtttttccaagtaatgagattaaaatctcatgctggtatgtgaaccatccctttgtctggtgtgcccacactgtgtatgctaccttcccctttgtctggtgtgtccacactgtaaatgctaccttcccctttgtctagtgtgcccacactgtatatgctacctgcccaatgctcacttagtggtcattttattatcagatgaatgagaatatctcagtgtggtaagtaatccttattttacttaatcgggccacaaagcatatgctcagtggtggctgactgctgtgattgctctactttattcttataattgaattcttcacattgattgtttaatattagttattatttttgttattagttattgttgctcttactgtgtctaatttagacactaaaccatcacaggtgtatattgataaggaagccacaatctctgaaatttcccacaacctctgaacatctaggaacataccctgtagataaaggaaagacaatgattttcctcaactcggcattttatacctttattaggagaaatctccaagaataaaaaaaaaatgctgcttgttaggagtacagactcctgggacctaccaaagcaaagtaattcagaattattcaggaaaggggtcttgaaatttgcattttaatgagctacttgggtgactccagaaagcatgtgaagcaagggcttccaagaagccagtggttaaacagttcttcaccctgcccctccccccatctgctaacagtgttttccagcttgccaatggtgagggaaaccttgcctttgctggtggtctgggttggacctgaaaggccaccatttgggacactttacatgcagtttgccttaaagtttaacactgggtttacattacacaatgttagcttccagtcttgtttggtttggatatacacatttggtttcatgatcagagctgaaagccaactgtcctatttaatttctctggaaaagccattacaaatcaattagttgcttttgctactgtgtcacaagtactggggaaaagcaactgcaaggagcaagggtttctcttggctcccagtttgaaggtagagtccatcacggtggggaaagtgttggccgcaggggtgggaggcagctggtcacatcacatctacatccaggaagcagacagagatagacactggtgctcagcctactgtctcctttttgttgggtctggacctctagcccagggcatcataatgagggtggctgttcccgcctctgttagcccactctagaaaagcccttacagacatgccagaagtatgtcccccggtgattctgtcacatgcaccatcacaagggattgacaatgtattgcatcctatttgtttaactttgtttattttgaaagtggtgtgtgtgtgtgtgtgtgtgtgtgtgtgtgtgtgtgtgtgtacatgtgtgcatgcataccatgcatggacctgcagaggccagaggaggatgttggtggtctgaccttatcactcccccacttatttctttgaaaaggggtttctcacaaagcttggagctgtgctggcagacatcaagctggctggtgggtcctgggggcttgaattcggtcccttttttgcacagaaaacattcatactcactggaaaatcttcctactcacgagactggccaccttttgttccaaacgttttgaacttttgaagaaatttggttataatttcagcagtaggctgaagttctgggaatgcttgcatatgggtctagtattcccaatgggcatctttaattgtactggataatgacagaggctgagaggactgtggaatgcaatgcttagaaacaaggtcttaagacattctgaaagcaagtataatgtgtagtattgcagaatgtggtggggacagcggtggatgggaaacagccttgtccctcaagctttatcaaggagataacccaaggttctgaggaatgttacacccttctctgtcactcacacatatgcacctactcacctcttgaatacatgcttgaatataccagggtcactaatttattccttattgccatatttagtgtcttgcctcaggcttttgcaatccataagcctgtaagcgacctaaatcccactaagagctccaaaacgaagaaaactgcaactctcccatgattagctgcctaactgaatatgagaaaaatgcaacatgtcattttattattaaatttagtactcaagagctcattataacacttgaaaataatttataggctgcattttctcattatgaaaggattcttgagtgtgcacaagggatgagagatcattgccaatagttaattaaatgagtgacttggaggttcataatttcaaatgcaaaattacagaaatcctttcaagatgcttttggagcagaaagtagagatttgtatgcaaaatttggatttgttttaatatgtttgggtggggccacacatgtgtgcatgcacgcgcccgtacacacacacacacacacacacacacacacacacaaagccatactcaagagtttcccataatgcaatgctattgaaccagtcacagggtcatagggaaatgaaatgctttttccttaatggttttgaagacagtgaaagacctttagtctcatggagagagctaactattgtgatgttttagcagacgatattcatgtgttctggtctaaggaactcagtgcaatacacttggatagctggagacgaggtaatacatgcctgagatgtggggagatcactttgtctctgtttctgaggtttctgtacatggtcagttggcctccttgctttgggcctgtagtggcacagggcatcatggttgcaatgaatagtgaaggtgatctgttcacttcatggtagttggaaagcaagaatgggggacttggagtgggggaaggaaaaggaggtgcagagtccaagatctcaatactcccttaaggacatgacgctagtgacctaacttccctctactaggccccatctcttaaagattccatcacttcccagtagggcttgggctgcagaccaacccttcagctcataggtgcctgtttgggcacctgtattgaaactgtaacagagggatctgaaggcactgtctaggcgctagctctggcctgctagagtactacctcctgagataaaggctctcagcaactgtccctccttctgtcatttcagtctctcctctgggtgtgggatcttgactggaaggaagctattcgaccctgtacatagttgttctcaaagccatagccctgatatttctacaggctttcccacctacctctggctgtcttccaccagcaggctggcttgcttcctggcaataaattcttgaagtaaaatctctgtgctcttgccctgttctggcattttccctaagctcccagtgggctccacctggaatgaaacctcaccaatacaaactgtcccactaggtccccagagaagaacaacaggacagtggatggccttcatattttcctgggagtgtctgcttctctcattaatgccaggaactctgtattcttgacaacctattttggttcctgtcccttagcgacagctagggccaccaagaggatctgtctcagctgtagctgacacagtcacccggactcggagcagctgcttttccaagcttcttcctcaccctactcctacctccctaggtatttcaactcagggccagactgctcaggtcactcagataccagagagccttgctgtcatatgtgttggccatggatgtccccactggctaggcccaagggggactttccttttgtctgttttctctgctgagctcagagttttttgcaatccaggcttagaggggcctggctctctgcttcttggaattctcttcaactttttctctttggaaaaagcaaattgctcatgacctgatgtgaggtgaatgaacagaacttgacatgttctttcttcttggtcctcaagcgtgttcagtgggagtaaaaccctttgaaccacaccagtgtcatttctgtataaagggtagctgctgcattcatttgagccagtgttttccaacatgtgctaaatgaaactgtcaaccccagagggtgctctctgagaagtgtgtgctgttcctctaagcagtccagggagatgagtattggttcctactctgtatggggagagtggcttcagcagacttctggactgtttcataccgaactacagcactggctttggtagaccgacagttatactgtacataacagtagttcaattgttaacattttcagccaaattttgtgctctttcagagagttatccaccttggcttggattgactctttggcttctagtctcattctagtctcattctgtgtacctcctcatgcttgcattttaagaagtggggggggggagctggagagatggctcagaggttaagagcactggctgctcttccagaggtcctgagttcaattcccagcaaccatgtggtggctcacaaccatatcttatgagatctggtgccctctttctggtgtgcagatatacatggaagcagaatgttgtatacataataaataaattaaaaaatttcagggatgtaagtcatgttttacacctatggctatgttctgatggctcctgtgttctggccagagcagttgccctgtaaggcctcccagatgtgggaggggatcagatatctggacatccagggcaatactccttcgagttcctagttgagctagcagagcagcacaagagactggccagttcaagctggaaagtgaggaaatagccagccaccagtggttgttggggtcctggctgggtgtttctgggttcttattcaagaaactgaaataaaggcttaaacagatttgccaaggagcaagaaaactatttaaaagtgaagcaatattacagatcagaaagaatacactattaataacaacagtaggccacatgagggacagtactggaggggcctgggaattggttggagtttttgtagacttcaagagaagtagtgacatagcacaggttcttctccaccttttcccaaatgaaataactaattaattaattgtgtgtgtgtgtgtgtgtgtgtgtcttagaggatgacttgtaggagccagttctctccttccactgtgtgggacctggagactgaacttggttctttagggttggtgacatgatcctttacccactaagctattccggttggctcattctctgttttaatggacaggcttagattatataagcctttgctcactgtgcattttttcccatgatacatctgatgttaatcacatttctgctcagttatgtataggcataaaatggtaaatagggatttctatttttttttaccataaaagatcactcagaggacaacatttatcttactgagcatgcaccccaaaccagtttaggctggattgaatgcttatattcatggatatggacgaagtatatttgaatagaaactgtctgtgaaaaaggaggttttgatagttgttaaggaaagagaagcttttttcacaatcagtgaggagtgtatgcagctcaatgcaggtgggggcctaggttgctaacaggttgctaggtgcattgttcacagaagtatgtgtgaatagtacatacagtaagggtctcaagctgccaagcacattattaaatgacgggtatgtacatagttcaacccaagtggagtcctaggttcctaaactattccctatgctttcctgtctcaagctggtgtcttacatttgccccaagtccatttcttccagtcctctggcctgaaggctggcccctatatactatctatagactcctcttttctccagacttatgttaaggttggataattgtgaacactgcagatgtctggcaaaagagaatgtggacaggcatttatttctctcccagcaggtttccatcagctggcaacatgcctttgcaaaggtccaggcccatgccaggcagtgccagtgatagctatttgggtgagaggatatagcctatctggtacctgcccaggggacatgggatctccactgtacttttcttcaccttgcatgcctgtgtagacagttcctgtataaaactctcttacgattactcgaatggagtgtctcattcctgataggaccttcacagagacaaagcataagtgacatgtacaagaatctgaagttgcaggattgaaggaggatccatcagaagaactttctccatcagaggagagagtctgaggctggaatcagtagagggggagggaggcagaggggctcttcactattgctggtggtcccagaatccagggattcccaggactcattccacttggtcccctctgagggagggatggattgttgttctatttcacaggtagaaaagctgagtgtacccagtacaagtgtcttagccaaattcacaaagccaggaaggggtggagttggaagaggactaggggtccttcctccccatgccaaggcatttggacgtgactgagcccatggtgtttgcttgctcttttgcccacgcaaaagtactttttaatgtccagctctattttttcacaaaaagtcattggcttttccatcagttgctttcctcacaacacttgagtcgttaaacaaaatcccttttaaaaataatattagagcagaactaatgcgtcctgacctttcctgatacttgctggcaaagttgaacccaatctcaagggacagaaaaccatgaaaggtaggcacagcctcaaatagtcccttgatggacatttattttcccagagcccacatggagatggttgcctggtaacttggtctggcttcaagagaatcatcacctgataagccacaggtcagagtcatgggatggagtgaaggttcaggtaggaagtattgttcagtccatggccttccaaacatagcatggcagctgcctctggctcccagcgggacctccttgaaggtttgtggccctgatggtctgcatacaaccctgctcagggaaccaactcatggaaactggagagttgggccctttagactatttggtcttcatgtctaaagagcagaaccctccaacaaagaactgagcatgtgcctctgttagggaccagatacagacgcagtgcatttctttcatggggtcattgtgttgatcagcaaagaagggaattgcttgcttctagtacaagtatacagaaacctgcccccccaaaaccaaaaagcctttagatttaaagtaggaaggggcttgtgttccatccatgcaagtgaaaggcacaaggactctcaggaaacacccaggctaattatacacagctgtccacatctccacacttggacttcacttctggccagggaggcacagctatggggcaggtaaatctttcaagtggctgtgtggctatggtgccactgggaggtcctggctgcttcactgagccagaggatgagccagattatattgttggatctctttctgtaactgaatagtttttttttaattgattcttcagagttgcaaatatctgaaacccgttgctagagagtagggacactatcccactaggctgtctgctcagactgttgagcagaggcagtaattggaagataaaagtccgataatgctaagaaacagactatacaatttcttctctgaactcttttgtccttgagtcacaccatctatgagctgtgaactttagtgtccttgagtcacaccatctatgagctatgtgaattaaatatagtttgttgagttcctgtttgatggatgataaggttgcttctgatttggctttatttgactcgaaggatagtactggaatagacacctttgaacatgcattcaagtttctctagagagtttatccagtggtgggcttgctggatggtggagcatgatcaatcctattaaaaactctcagagaactgtataatcgtgtggacagtgtttggaattctgctttcccacaaactccaacacttggtactttctctccttcctctctctcccctcccttcttaccgctctttctctcctctctctctctctaccttcacacacacacacacacacacacacacacacacacacacacacacacacacacacacacacactgtctccctctctcacactctctcccctccctcccatcttccctctctcccatccctttattttgttatttattctatggctgtgaaatgttacctgaccactgtcctatcatttattgtatattttcagattggccaatcagtctctttcctgtgaactgcatgggtcgtttcagatgttcttactaatttgatttacagtgttttattgaggttgatgaatccttcagtacacactgcaagtatcttttctaaatctacagcttaccctcttttcacgaacctttggcagaaaaggaaatatttgtaatttttaatgcaactaaatttatcacatttcctttacatttagataggcacatacttgttccctcaaagtttcactgtagacatccatgggagtcagttactaatgctgttctgtcagattaggctgttagtgagtgagttaggtaggaagtgggttcacagcacacgggggacaaacactgaggtctctgtggccctagtgaagctgagtccaatatgaaacatgaggaccaggtgcagatgtttgctttgggaaaactgaagagccatgacatttcagtgaagaccgctgcctcccagggtcactctgtcctcacagagtggtggcacaaccttatgcagatgctaatttctgtggtctcagtgagcacctatgaatagtgtctttgttttcttccctccagcctctaagtgtctccccctcctctcacttacaatgtcatctccacagatctctagggtagcatttagaaaaagatgctagtagcattcagaagaggagaaaagtgacttttctataaattcaggaggctttgttgtactgcaatgttctctgtcccaggttggagctgtcttgtcagttctcaatacttttggactctagaagctaatatgttggttcaaagtctcctgaaggcattaaatatgctttttagtagcttcaatcagaggtatgagtcagaaaacaaagcaaaaggaaaccaagtaagatgatttattgttctctattcttagtacactcctacagaagtctggaggacagaggacaactgtctcttggccaccccttgctcagcttgagaactcagagcttaagttctcttagtttccgctactaggcgattttttaaaattattatttgaagacaatcagaaccaggctgttgcatcaaagtgccgtagcaccggggctgtgaacatgaacttggtttcccacacaggggcatcctggtctcttattagtcaaagagaataaagccatggttgtttcagttctgcatatttattttcttggatctttggtcagttttcttaagccgagattatttttctctttcaagttaagttgggatcttcagaaatctgtgtgccttatgctgccagacactagcaaatatgacagggaagggtcctcttctttctcccacagcacagatataaaaatgaatatgcagaagtgtccagatgagacatcaaaggttcctaggctgggaattctccattgctttatagctggccaacacctacaagtatcgagggacaagacacatgcggttatcttaatctttgccttttaaatattctcaggtgataaacctgcctccttttggctaactgaagatcccatactgagaagagagataatgttgtaactcaggaggcctttctatagtggtgagagtggagtgctgtcacatctgatccttacagcctatctgataagacaagcagaaaggtgtcatttcacatgtgggttctgaggtttagataatgctgagatgatgtgggcccaaggtcacacaacactgctcaagtttatatatgcttgaaaacaaaacaaaacaaaacgtttgcaatcatcttggtgtgaccgctcaatgttttgtgtctattttatctgagagtgtgagtcagtccatcaaaacaaaaatggcttatgaatagacttaagattactattagaaggcttgggagtttaactcagtgctggagtccttgcctcttgtgtgcaagaattcaagctttatcattggaagataaaaagaaaaaagatcaggggagactgctattagaaaacaaggtttggatgaactctacctcattcatatttatgatctgggcaggattcctttaaaaaggattttaaagtacaagttcatataagccttttattagggagcatctgcagacagcagagccagataacaaagggctgtgtgagtgaacacgaacatgtaaggatgctgaagagctaacctgaagactgctacgtgcctgctggacattaccaacatatgggggctcccttgtttcctaggagtacaaaaatgttgctaattcaaacatgcatttaattttaaacactccagagggatttttcatgcaaataaccttttaaaaatagttaaataattgtggttttcctctatacacccctccataggatcttattctttgaagtcaggctggctggctccaaattcttgttccttctacttcggcctcctaaacatgtgccaccatgcctagccttaaaataaagttttaactgaaggataatgtgcatgtaaaaagtgctcaatccataagtgtacatattccaagcaatttttacataatacacacacacatgcaacaatcactgctatgaagaaacatccttcctcatcagtcttctccatccgtccccagctacccagcatcctgatttctgccaccaccgatttctttgaccccgtttgtaccgcatctaagtggaatactgcagtatccctttgtctggcttcttgactccacgttgccaatcactgcttacgttgttctacgttgtggagatctactcatttttgctgtgctatggtatggcactgtactgtgttgaacaaatatgctgtagtcagtgtgactctgcatccctccatgatgagattccctgtcttctccagcattggcaactccattctttccctctactaaaactgtggttttagtgtgcaattccaagtagttttcatatgctaattgatcctttggatatcatcttgtggaaagtgtggaccttctctattttgttttttatttctttgtggacttttactttttaaaagtgattcataggaatttaaaatagggagagtgcgtgaggacttcgttggatatgtgtaatacagatatcttctcccagaatatgaaggtgaagcctgttaaagaaaggtcaagaattcagaacacagaacatggtcccgtggacccctcttgatgtttaacaaaggtgatattggcaaagggacccagatcttgtcacttttgaatctgttacaactttgtagggttatacaatcagctgggtgagccagagaaacttccaactcttccaaaatccattttgaaagttaatcctcttcagagcccaggtgttgaaagaattaaaaaggggaggggggctttgaagagacaatgaggccagcagggttccttccttgttcctgaatttacaacccttatgaaagatgtttcgtggagcaggtggcaagttgcttttctgtattttgctttgtgaggacatagaaaattcctcaccaggccaaatatgggcactgtactcttgggcatccctccaaaactatgagaaataactttttgttctctataaatcagtctcgggcattttgtttttagcaggacaaaaatgtatctaggcagactttcagatggcagatcattcaagatagattttgacagagattggaaacggagggttgatcggagttaagtgaatgacatagaagggctagcactatccagcaggagcagaaggcaggcaggaacatctctgggaaatagagaagagctttaggagcacagagtacaaggaggaacatcggggaagctgctgtaaagtaaggctaagagaaggaggagatgacttaatgcagtatgttctgttagccaccaggcagggctcattccccctggcaggagagttgcagcctccacagtctccctactctctctttccttggcagagctttccatttgctcctggcctatggtggcagtgctctggccgctacactttcagcttttgtattcaaggattgtggacaccgggggctttctgccaacaggaggtctaacccagagtgtctgctgagtgctgtgcttgggatgagtcccaagttcagggtagggacgggaattcctttctgaccccaaggcacaatcattttacactcagggccctggaatttaattacccatcttatctcagcttgcatagctgcaactatggctcatagttacacaagtatctggttctttacaatccagcctggtgccctcctgacagtgattgattgggaagggtggaacctgggaaatcctctcccctcccttcagtcctgccaacttggctttgaacccacaagagtattttggatgaagattatgtgtcctcatggctgcctcccccacccagcttctccctgtgttacattctatttgacactcttgtgagtttacatttttatgttaactgtgacccatattttcctatgtgctccattgggtttctgtgtgctttattcttccttctttgagttcttgaagatgaagttagcagctctgaacgttctcctttgttctaaggtttgtggagaggctattccattgttcttcccaggatataagtgaaattgcatatttttcttaaactgttgaaaaggagatgagctagaacctttgaggctaatgaacatctaagtagctaattacaaaacaatattgcacacatccctttgtttggactttcattcattcagggtggtgcctaatacaatcgtttgcttaatggcatctatatatccgcaatagtaagcgtttcattaccgtgacaaaatgccagagaaagtaatttgaaataaggaaatatttattttaggtctaagtttcaaattttggtttgagttatctagagtcattgttatatgcatgagatggggagaatattgtggttgcaggaatatatggcaatgactgctcaccttgtggtggctgggaagcagactaatgatatggtccccaaggacttggcccaagtgacctacttcctccagctagattcatattccacacttctgctccctctctgcagtctatctaatgtgaatccatcagtgcatcgagccatttaggtcataaccttactacatcatcatctttggaacaacctacccaacctacccaaaggcatgcttcatcaatcttctaggtgtctcttaatccaatcaagtagaaaattaagattaactatctcaatatcataagttattggtctattctcctaggatatttatttatattgtttcagttattgtaaatagcgattgatcagtcttgtcaaatcttatgttatactatgttgagtaacatcacacacttggatctccaggaaacggctctaaaagaaatttgcctgtagggagtttattcttttctaccttaaagaccaaagctgcctctaagatcaatactcttttcagtcaggtctccgttactttaacaaaatacctgtgacagtcaatgtagaaagaagagatgtttgttctggttttagaggttttatttcattgtcaccagaccatattgcctttgggcttatggtgatgcagcccacattagtaggagcacatggttcaggaaactgatcacctcatgagaagtaaaaaaaaaaaagaaaaagaaagaaaatgagaacaacatcccgcagccctttgagggcatgcccccaaagatctcaaacatcacactgagtattccttaaggatcttcataatctttaatagtgctgagatggggaccaagtcctaacatgagggcatttagggaacatatcatatccaaattataggaaagggacagacagacaaacacctaactactgaaggcacataaaggccttcagccaacatgtaaggagccctggaactgaaatagcttcacagagctgtaccaaagttaggacaaatgatagacctttgactattccacatggaccaggcactaattaggttgacctagtggtggctttctgacattaagtgggacatctttttttttttttttagaacttttttatttatttatgactgcacatatgcctccatttcagaaaagggcatcgggtcccattatagatggctgtgagccaccatgtagttgctgggagtttaactcaggacctctggaagagcagccagtgctcttaaccactgagcaatctctccagcccaagtgaaatatcttttattactccctcagcctagacacatgggggagagcctaggccctattccaaaggatatgacagactctgaagatccccccatggaagacctcactctccctggggagcagaaatggtattggataggtagggttgttagtggggggcaggggaggaggggagggagaaggaatggggattgacatgttaaacaatcttgtttctaatttaaataaaaaataaataaaacaacattaaaaaaggaaagaaagctgtatttgttagctggaagccatcaggattcctagatgctgccaaatttataggaacactgatattagaatcattcatgcattgacttagtatatcttgtattatagagaaagcagagttgagagcattgaaaggtgttacttactttgtaacgcacagcttcaaaactaagctgtcaacagctcttcaagttgttctgaaatgtacttatggaccaagtaggtcataagacttcctactgagctgagaaaataaaggaaatcaggcatgtgaattgatggttgtctcaaattttattttttagagtggctaaatcaatgaaggtccctgtatatgagacccctgctggatggagattcttctcaaatctgatggactctggacgatgctctctgtgtggagaagagagctttggcactggtaggttgggctgggctaatgttactggtgagggtggctgcagttcttcaaatccattggagacttttacatctttctgtgcatcaaaggctggaggaagaattacttagaagcaaaaaaaaaaaaaaaaaaatcagaggaatccattaggatgtgtacactgacacattcacctcttttgggtatctctaaaaaaaagttcctttctttatgaaaaaagttctgttacgagaatttaaaaattgtaagtgtagacagaatatcatattaattgtaccactcaatttccagtattatcaactcatggtcagtctcttgctctctctttttgagacagaatttctttgtgtatccctggctgtctaagaattagctctatagaccaggctggccttgaactctcagagatctgcctgcctctgcctcccaagtgctgggataaaggtgtgtgctaccactgcatggctatggtcagtctttttttatcattatttgataaaaataattcagtcttcagtactggagactgaactttgggtttttcatttgctatacaagtgctctgtctacagctttcaaaatctttttaaactatagctttcaaatcttttaagtttagagttagggcctcactatgcaagctgtgatctttgacttcagagtagaatacagtggtgcttcactatgttgcatgccacatttttttttttaaagacaaggtctttctacgtatctgaggctagtcttgaattcactatataactcaaactggcttcacacttgaactttccatcttcctgcccttatctcctgaatgtttggtaggtactacaatatccctccatccctccctccatccatccgtccccccctctctctttataaatgatcatcaacatggctttctgtactctctccacaaagaaagttacctttccttattattatgaagcaacctcctaacccaaagctcatcttgttattcctgaatagttcagtgggaatctttaattataaatccatgttggaaaaagcatataaccatggcaccattgtcacagttaaaatgtttaaaattacttctttaataacttaaagatgtcactccattgctttgcatatttccatgattctgttataatttgtatctctattcttctatataaagtgcctcctccaagtcatatgccctctggctgtcttcaattttcttttaatttttgatttccgatgactaaaatttaatatgtttctctctctctctctctctctgtgtgtgtgtgtgtgtgtgtgtgtgtgtgtgtgtgagagagagagagagagagagagagagagagagagagagagagagtgatgtttctgggtctatatttattgttagtttcagaaacagtcactaccttttcaaacatttatctttcatattgagattacagttacactatgtgttgatcactcatgaccaaagatgttgacctgaagcttttacacacactcatctaatttggtttctctctctctctctctctctctctctctctctctctctctctctctctctctctctctctgtgtgtgtgtgtgtgtgtggtgtggtgtgtgtgtgtgtgtgtgtgtgtgtgtgtggtgtgtgtgtgcttaagttcagatgatccttgttgacatatgtcttcggtttcatgacaaaaagcaacttgtggagagaagttatttcatcttacagcttatagtacatcatcaatgaagtcaaggcaggcactcaaggcaggagctgaaggcagaggaactgcagtagaagttgtggatggatgctgcttatgctggctactggtttgcccagcctactttcttaacagcttaggcccaccttcccaggtgtgacactacccctgttagctggaccctctatgtcaatcattaaatcaagaaaatgcttacacacttgcctgtaagcactctgctggacatattttctcagttgaagtttctctccccaaaaaactctagtttgtgtcaggctaacaaaaaaaaatggaacagcacaacttatctttatatttatctattctttccttagttttcaatgtgctgatgagtctattgaagggactctgatgtgagatgttttgcttgttgagatagaagagggcacctcagttgagaaaattcctccatcagattgccggtaggcaaatctgtgggggcattttcttaagtaatgatttatgtcgaaggccccagaccactgtagcagtgtttccctggacaagttgtcctcaggccatgaacactaagtcagtaatcagctttcttctatgacctccatttcattcctgcctccacgttcctgccttgagtgcctgccctgattccctcagtgatggagtgtgacctgggggttgtaaattgaatacatccctttcctcttaactggatttttggtcagtgtttcatcaccacagtagaaagcaaattaggaccacttgctaatacacattcctacttagtaaacatttattaactgctttgcaattataaagcattccattgggtgacatgttgaatacaaagtgatgaagaccatattcctaaggataataatatttctacaaaacagaaactttgaaggaccacaaagaggcatagagaatgcactttaggagatgagatgagggaaaaatccactgggactagaactttgacctgtgtgctttttgaaagagatggaagctgagcttgtacttgaagaatggggaggatttttagacagagacatgaaagaccaaggacttgccagaagggatagtgtcagaaagtcaatggaagtagaagagcagggacttgtcttttaggtagtcaatggcttactttttctggagtggtatttttcaaatatggatcatgagattagcatggtaacatcagttgctttaaggaatagaagctgtgggagtgcattgcaattcagacattgcttgccaaaacttctgtgtgtatgtaactatacatatgcacacatatgtgtacagtagttatcctggtaaaatgcacttactatagatcatggtaaaaatatctgtaaccatctttggccagaatcacaaaacttttcataaaaggcaagatagtaaatattttaggctttaccagccacaaggcctcagggggtccctgtcaaaattactcagctctgactgtggcacaaagctgtcacagatgatgactaaacataccagcatgactatcctccaataaagtgttagtcctggacacaagtgtgagttcagagtttgcccaagggctgtcatttgcaatctctgaacacaggggtaggtagaggagagagtttgaagaaccagaactggaaatatcatgagaagggagtttctgaagcctgttaacttagatattgggccccagcaagatgtagcttagactctcagctagctggcagtgggaacaccactttccccatgtggggaggtcagcctgcaggcactttcagcaagttctgctttgaggtagtgatgctgactgcaacatgaaggctggactggatggggatttaaaaaactttcacttttggagttgtctgtcattttcctttcaaggaacacaggagatttttttttcatgtcaagggctttaaaattgttgcatcctctgccattttggcaggttaaaaatgttagcctactttaatcaatggagcctctgagcccaaggaatagtgaaatggttctcccagggtgctggagcctggaagaagtctgcattttcatgaaatctagcagaactaaaaggcatttctctgactctttagtgtatactgattccaccacacttgtcagtcttcccaggaaaataatgactccttctgcctctgaatcagttgaaagtatgtgaccactctagtgcctacaggaatgtggtgctgaatctggaaaagagaagaggcttcattagctcttgggtcaggcttctttaataccagatcgtggaaaggctctgagctggctgtatcagaaccacaggggagcttggttttgtgtgtgttcgacttgaatccctgagagtgattcaaaaatggtgccatgggtctttactttttttaaaataatttatttgtttttattttatgtgcattggtgtttgtctgcatgtatgtctgtgtgagggtgttggatcccatggaacaggtagtacagacagctgtggactgacacagggatgtggggaattgaaccctggtcctctggaaaaatagccagtgctcttaaccattgaaccatctctctagcccctgagtctttgcatttaaaagaagtatgtttaagtagttctggtatacattcaggaacgaatacattcagggtgagatatcagtggtttttgctttgcatcaaggctgggagaaagagtgtatctgagcttccacactgagttgaactaagcagtacaaggacacagggacagaaggcttgcgactcacatccaggacggttgttttcatactgaaggtcaaccaggtggcttctatgtccctcgtttccaacttgtagacaatggtccatcataagagttacttatctatgctagaacatgcatttcagaatcaatgctaatcataggaagagaaatgggatagatgcagagaagcttctagagtgtacttcagctttccaaagtagaggcctgtgccagtgtccctggggcatggaactgtgtaccaaccaagaatgtacagtgcagtgccaagagagcttggaaataagactcaacctcagctcaaggatgccaagacattgcccagagttaggtccacaaggagcaagctatatcctgaatagaaatgtccctgctggcatctctggttcacagggttgccaaagtagcagtctggtagacagagctgtgtttgggtttctcttgtgtgagacgatccaggtagcaggaacctgcattcatagctatatcaaagaaactggacaataaaggccaagtcatcttttatgctaggatcaggtgtccacccatggcccaggaaggatctggaaatctgctttactggggggtagggacattttgtacatacttagtcaaacagaagattattcatctaaatggcatttgggcttcttcttccaattttaaaggaatctgggcttataccaaacacaaagagaatgtactaatatactaaaattaggatttttttaaaaagccaaaacttagggggaaacttgttttttgcactgttgaaaatgttcctccactttttatcattagcatcagttttctaagaggtcatgttgttttcagagtatatggattgtcgtagcccagagtttggaagtttgtcccattgcaggcaatgctgaagaactgccctccatgttcaagggctctgagcttgaccaccagagttagtactgtcacctgcacagcagcaaaggctctcaatcctgccaaagaaaaccatgcactacaacaatattggttgtttccaagcaagcatgctatgttgagttttctacaataacaaccttgtttgtttaagtaagtcagattattcctaagttaattatgcatccatttctttatgaaaatctggaattacatacagaactcctgacaataatacacttatctaaattgcccaaccagatttttgccttgtggattcttgagtacagcaccatggcctcgagttggcaattttcacatcttggattttagcataacagaaagagccctgttgcttgccttgcctcagagtcctaagtacccttctgattttctgaggtctgctggatttctctgctgtcatgtgggtactgcaaacatgccaatgataggagccgtgcctgccttcttcagacctcattctttgatataaagaaggtcttgagtaaatgctcataggacccatagaagagcagaaagagagatctaggaaaagagggaagacaaggagggagcatttcaactttgctatttcttcctctcatcagtaatggtatttttatcattcttaaatggatgtgtttcttgaaatctggaaatacgagtatcccaacattttgaaggactcactgggacaactcaaatatacacacaaaccatttggggatagcccacttgaaagaggatgtaataaagattgataaaagcaaaattatgtaaattctaaaactattttgattttttgttatcattaccagcacagattcgtaactaataaaacacttctagaaagatctctccttccaaaacccatacaaatggtcagattttaaagtgttggtagtttgtactattaacttgtccagttcccctgtgggtgctgacactctctgggacactactatgcttgacagtaggctgtttccagcttttgtggtgttcttgatgtcactaaatattagtgtctttatcatagtcattctgtgatctgctgttttgtggtctgcaatattgacttattctccaggggctttgtgtaaggaaattttgtacagtttatggcaccctcaggccactctcctctgtttctactctcattatatatgatctacatacattgtgactcaagactgggttcccagcagtgctgtggcacagatattgaggaggcttcagtctcccatgtttgtccaactattttatgtttctccaagtcaaatgagggaaagcttatgtctgctctcttccaaggggtcttaacttcacatttgtctgttttcaattctgcccagtcagcaggagaaagaaagaggtcaacctatctccaagtttcagataattgagtatagttatttttcttctctgtggccagtgcttctaaatttggctagattgcagaaggggccagcggttgtgatgacaacattatcaaggttgggagaaagtttctctgcaggactgttagaaatgggctgtgtgcaattcagtctaggttagggagagtgtagaggcactgtgattacatccccaagagcctccttgtaacactgggaaattgaaactactttttggattctctgcaagctatcacctgctgtgttggaaacaaaactcccattagcgtgggaagaatatctccatcacatgacccctttccatgagattttcatggaacactctccattgaccactcagttaatactgcatgttgttgatgaatagtggcaagagtgttgtgtaaatggaaacacaggattggtgcctttgagctccatctacacattccagtgcctcctgggacctagagcctaggggatcgtggccattcgttacaggctaaagatttccaaatagaatgagaattactttgcacagtgcctattaagggacttttaaagactgtgccttgtcctttgggatttagattcgatccctaaaattgtactttgagcatccctaatgggttttggaggtggggagagttactagttactaagagaccttacggaggagggagtgtagtgactgagtgaaaggtctttagcctgaaatctattggggatattcctggtttagtatatgacttgttggaaacaattcctagagagttctgttgttcctatgagccttggtaacacaggaataacgtgggatatataaattaagagatctctattctagggttagtgtgtcactgggagggaagtgtgtccactggctgccatgaaactgccaacatgctccattctctggcctggggagtcaattgactaggaataaataaataaaatagtgctaatatttgttacttatggaagcctcataaacaatagacacaatgccttgacaccccccactccacgctttgttttccaccctgaaatgaagaagggaccataaatggctcctgttttatagatgaagtcactgtggcttagggaggctcaagtacctggctaaagtcatcttgaccaagaaaggattcactcttttttttttttttttttgcaggttttttaaattttgaattagaaacaagattgttttacatgacaatcccagttcccttctccctcccatcctccctaccacctccccaactaaaaccctacctatcacaaatcctttctgctccccctggatggtgaggccttccatagggtgtcatcagagtctatcatatcctttgggatagggcctaggcccacccccgtgtgtcttggctcagggagtatccctctatgtggaatgggctcccaaagtccacacctatgctagggataagtactgaactactacaagaggtcccatagatttctgaggtttcctcattgaaatccatgtcctggggtctggatcagtcccatgctggtatcccagctatcagtttggggaacaagagttccccgatattcaggtcagctgtttttgtgggtttcaccagctttgtctagacccctttgctcttcattcctccttctctacatctggattccagttcagttcagtgataagttgtggttgtcggcttctacttccaccagttgctggatgagggctatcgggtggcatataagacagtcatcaatctcaatacaaggggagggcatttaaggtagcctctcctctgttgcttaggttgttagctggtgtcatcattgtagatttccagacatttccctagtgcctgatttctctgtaaacctaaaatgtctccctctattatggtatctccattcttgttatcttctattcttcacctgactcaacctttctgctccctcatgtcctcctcaccctcctcttctccccttctcattctcctagctccctcccccctcttcctgtgctcccaatttgctcagaggatcttggccccttttccccttctccaggggaccattctctcttagggtcctgaaaggattcactcttcctggttctccatcacctgctgctgctatttcaattcagtgaggctagcaagtcattttccaaggcccttcttatccttttgtatggagatggagtcaattccatgtaacttggaggatggtgtcttgtaaatggcatagcaccgggagctggcagagctagctctagtcttgacagccctgctctagtctgtggttctgttgattcagacagctttgatttttccgcacctttcatcttctcacctgtgagatgggtcttgtcaggcagatgacctatggagtttcccctattgcgatacattgctctgtctagcttcacttttaggaaggagccataggtccatgctgtcacttatttaattcatgcagcaaacatttccttcatgcctttcaggagccaggccaggaatacagcgaagagaaattttagatgtaagcccttccccagtagagtttgcaaggcagcgctaaaaggacaattagcccgatcgtgttgtgtgagctatcattagtagcactgtctttttcatatggcccatctattacaactcttacttatcaagacccatggagcctacagtgcggaggacatgagggcagcagttgctgccacatggcctttctgaactcacagcaggctctgaccctgttcaggcaactgcgcatttcagaacatttatcttttagcatggaaaggtgactggcttttagtgagccttccttcctatcatatgcgagagagttgaatacaattagagaaatatagacaaaacaagttgggtcaccattctttagtacattctggagtctatccagaaggttttatctcatgatcctgctgggtaatgaaaataaatccctgccgtgggcagatgacatgaagatggagagggtttcacaattgaatgagagttagaagtgagcggacaggagctcctgagatgcggagtatgaaaagggagaattgcaagtccattccccatcccttagatggaaggccttagccatctcttgccacatgttcactccacctgctttcctctggaacttctgttatcaccttgctacccagtagtcaggaagtccagaggtttttggagccaagctgcccagattcaaatcttctgtttgttacttaagagctgtgtgacctcatgtggctgacttgactgcatcccttgtccacaagaaagggttgtcacattgtaagccttaggaaagtaatgtatgaaatagctgagaacggtgcctgtgcctcactgttctcatggaagggaatttactctgcttgtagttctgctttcacagtcagcgtgatgtttacatatgtaactgtatgggcgcatatgccatgcctcattttgggttccagggaatgtgtgtgcagaagcacatgctgaatgttcacgtttcctaaaaagtacccagaacctctttggaaaagtggtcctttctattggatggccaatgttctgctttgtccgggacatcaaagcttcttaggagatgggacttctcacacccaaactggaaaagtcctaggatgaattggtcactccagaactagccaggtcctcacatttccagatgcaaatgacaggaagaaactgtaagtttcacccacatgacgagcccaggggtatcttgagctggacttacgcagtagctgttatcttcatccatacttacagcaaaagaaggtggacatggacctcaggccagcatgagattgtgcttcttctcaagaagtccctcccagccatggcagcctgtgacactcacccagggagctatgaaaggattcccaatgtctggggtgacaggccctacaggatcctgaacgtgggtgtttgtaaaagttcttcagtgactatagcatgccatccaggcttgagaactgctagcttgtgctagagttcagttacagtcttggcagctcggctgtgccagatgtgagtgcaagatgccctggatttcctagctatgccaggtgtgagtacaggattccctggatttcctaactaacagattcagaatccctgagatttagttgcattgatttgacctggtcacacagtatatgtgtggtgttttattgatttgcacattgaaagaaagtccttctacttttccttgattgccttcttttatttttttcctgtctgttctcccctctggtgagtgcagtatgcgcattggtgactgctgaccctaaggaactgatgatggtgatggtgtatgcgtgtgtaatataggggcatgtttggaggtcaaagaacaacttttgggcattggttctccccttccattgtgggttctggggatcacattcaggtcaccaggcttggtggtagatacttttacccactaagacatcacacaggcccaaggaatgtggttttaaagcttgaaaatgttccaggtctgatttgagtggagagggatcactgatatttctgacaagaaaatagacccttttttgtgctgcctctactggagtctggcagtgaagaactgtgccccattcaggcatgtgggttctggctcgatggactgggcagatgaaggtgaggtgggcttgggtcaggctggcttggattgaggaagaaaagctgagtgatacttctagacttttgaaactggggctaaattctacttgctttgtcccagctgaatggcaggctttggctgtatggacagccagaagctagaggaagcaagtttcaaaaattgtactggtgttactcagtaccccaaaggtgctcccctgtgtgtgtgtgtgtgtgtgtgtgtgtgtgtgtgtgtgtgtgtgtgtgtgtgtgtgtcccgctgccagccatgaaaagataggaaggacatggacaagcatatcacagagtgaaagaagcccacctcaaagggctgcatacatgcaacattctggaacacacgtgttccacatctaaatatctatgtatcattgcaaaatttaaaaattgaagttttctcttgaaagtaatatgtacatacttattgtagaaataaacaagagacagaaaagaaaagcaaacagagttctgagatttcagagctacgtagccgttgttagatatgttgcccacctgtgcccacatgtttccccacaagaatacactcgatattatttttgttgaactgtttccatttgttaaaattgcatgagcatcactctatgttactgaagatctggttaatattttgcctatacaggaggtttctctttggctttttcacaatgactgttgctcaacagctaatacttatttttccaaatttcccctctaagttgtttctgtgagtgaatgcctctaagagtaaaggttaagaaagagagcagcagagtccaaaggccattggcatgtaaaggcttttgattagtattatcaaactactggaccaaattgccctcatctacactggtgcttcacaattgcccggaaagttcctttgtaagccagcctttgctagtggggcagcctccaaatgcttttctctgagcacagtgagactaaacattcatttagatgttcactggccattattattttcctcttgacagttgctaatttgggatgtgactcgtgttgcactggcctcaaaagaaaagggcttgcttgtgactttcctacggctgtctactggggtccccctcttactgaaaacattttatagcatgccgtttgttgtttgtgtcatatattgctatctctttctgtgtatctatgatctatgtatctatcatctctctatctctctatcatctatagtgtgggttttctctcatgcattcgcatatgagcacatacatttccccccatttatattaggcttttagagaaatacttgcttctttgtgcattcacatttcttacatgatttccctggcactgatagggagggcattggagttcacttgccttaaagatgtattaaaggactctacccccaccaagcaccgtgatcatccaatgtcaacatctacatacttgcagcatcatttctcatccctctcacttcctcagtgaactagagagcacagctaacttcatttgatcatcagccccctatgattcttggcaaatgttacccctgttggcaaagatgtccaggtcagctcacaatttactatgtgttatctacagataacccggggtgggttttatccatctaaaagaactctggtctccatgccactaaattctgacatctctcttaaggccttaacagcatctaatggttctatctctggtaatgtgatccagctggagatccaaggtatgcaaagcccttgttttagacaaaggggcatttttctgcagccagtgagtaaaagtgactttttttcagctataaaaggacaagagggtttgagatgattgcactgggcagggtttcctaggcttgttattttggcagtgggccatattgctatgcctgagccttccaaatttcttcaatttcttgtagcagcatgaagagctcactggctgggacaagtctctttatggtgtgatgattaatgcccagtgtcttcttaacctggagccaaccacggtgggacatccaacagtgtcattggcagaccattgatcagagtgtgttaagaactaaagactgaagacttgactctttcctattgatttaagttactttgctgccctctctggttacatgtttttctccttgagagaaaatatttaacatttagtactgtaggtagaacaatgatggtaaacagcctgtagtttcaaccttagtccccatagatgtttgacttaatgaggaaaaacattttgtatcattttcaaggttttaagagctctgtgtctgagtctgttttgttgatttgttaggtctatttcatcaccttaaaagcaagaatgagcttgtccattctcactgcctgattgcaatgggaaatggtccacttttgggctcagtctgatttcctaagaagttactattgctgagtcaaaagaagaagaaagtggcttgtgttataacagaatgatttgttttaaaacaagtattaggaatcggcattgtaggcaccatatgaaaattcctctcagccacaagcctctgtgatgtctcagtcgcttctaaatgcttatgaatatttagttgattaatcccagaagaagccatagggtacagactgttactatccttgtagtataaacaagtatagcaaacagaagtaggtggctaagacaggatctgaacatgcaaaattgttctctagaatgtgccttcctttgctgccttttaaaggacatggccttactatgttacccgggctgactttgaacttctaacactgctttaccttatggtgtagctagaaatacaggcaagcaccaccattgtagtgcctgctctttgaacttgattcaattgttacaggatcacaagattggtaatagtatcattatattacagatgagaaattgaagcttggaaggtttagcaacttttttgttgttgttttcagttttttgagacagggtttctctgtgtagctctggccatcctggaactcactctatagaccaggctggcctaaaactcagagattcacctgcctctgtctcctgagtgctaagattaaaggcattcgacaccactgcccaacatgggctagtaacttctaagtgatgtttcacacctggcacacagcagaggtttgttgggcccctcattccaaagccttcctcacgcttttctcacactgcaacatgttcctctcaattcagccctttgtccacttcagagaaagctgctgctggccaagagacataagttaagtatatctgcaacacaaactcctgggtccacatggcccatcgaactccccattcgggctgtatgagttatttctataagggccacagtgagaaatgtttctctttcctataatataaatagctgcaggatccagtttctcagctatccctgcctctgggactttggggtttctgtcctttggcttggacgctctcttgtctagatgcctgtgtccgttttatcaccctgacgcctcattgtcaggtgtgatcaactcactggatctgaccctcagagctgcattagtctccagggtggccataacggttcagcacaagatgggcagtttgaatggtgtaagtggactctttagttccagagtactgaaggcatccagtgtgaaggtgctgcccaggctgggtttccactgaggactgtggtgcagtattccttcttgcttcttcagaagcctctgtgcactttttagctcacagcagtgtaactcccggctcagtgtctatgtagcctgtggctctatttctccctttccatgtctttggttataagatcagcaccattagatttaagacccaactggatattccaggatgactgcatttcaagatccctaacttaattatacctgcaaagaccatttccaacccctcagatccacatccttaggtgacagaagactgtgtcttttgtgctaaccacagccttcattgccgtcctgtgatgccagcatctcctctaattccttcagagcatttgtccttatctgattcatcatatgcttctgtccacttttctcttgcctgcctccatatacttgatctcagactttaagtaaagaactttcttgttcacttctgtttttgccaggatatagaaaaatgctgagatgattggaagagttgtcaaatatttactgagtaaaaggatgaatatataataatatcatgttattttgggtcttcaattccttcaacaatttttaggattttattatatttttgttgttatattatttgaattcatttacatatttttaaagaaaaaaaaacaagtatattataacatacctactctgcatagtgggtaaaactatacagcttttttgatacaattccaaattgctaaatggtcttgtgacttttgcttttccccaggagagacccctcaatagaatctctctttttgccttaggatctgatcacctccgagagaaagatggcctctgggctgttttggtttggctgtccattattgctgcccggaagcagagcgtggaggaaattgttagagatcattgggccaaatatggccgccactactactgcaggtgaggatgggcaggttctctgtgtgtgtcttgagaactactcttagagatgttttctaaaactgatgggctagaattgaacaagaaagcatcttttagaaacatcctagggactggaaggctggggttggctgttagggagtactgtcaaggactactaaagtgaaaggacagatttcacttgccctggtgacattcccccttaatattttcattgaagctataaggcaaatgggtggtcatgccaagagggtatcaaaacgcaacactttgagtaattccttgtgatccttggttgctgtagtcaaagccgacacatttcttgtttgttctatgtgatcttttaaaggagtgggcagacacaaagccacaattgggtgtttttgaagtcttctcccaccctgtgtctaatgcccacactaatggtcagaaggcttttgttatggctgagctgggactctctgcatggcccgcatggctcagcagccccagatttttgctggaggcttaccctgataaaaagagacacagagaagggaaattttctctctgaaggaggcaaaggaaagaatgggggcccggaactcagggtagctgttctatccctttcctgttgttgaagtaaaagaatatttcaaggttatgccacctaggtgtgtgccaggttgtgtacctactaccaagccttgcttcggggaaagggtggtagaaagaattgttgactctgggcaactatgtgtgggaaaggggacttttgggagcctcagactcagggttagagacagaggttggctcattctgttctgcatacatgtggttatcagttttggatgttcagttgagtttcaagagcttgaggggcaaagagcttttgacttttcccttatgtggcgatgtttcttcttttaaaaagcatctacttaaataaatatcagagaataatgaagacctcgagggtacttattaaactctaagggacttcagtgttccaggaaatagagacaacagccataatagctttgattcctggttagttaagaagactgggaatgtgaaaataaataaatcagcatattatacattgaggcatataacaaattctcaaggcaggtgggatcttgttttgcccatcaatatttctaacatgggtcacacacccctgatccttgggaagttttatttatgtatttgcttaatttatatccaaagattagttgccacatgaatttcttctgttgcatgaagatcttacaaagatttcaacctgacaaaaatattttgtgcttgctagctagctgggcgattactctgagtcagagatatgtgccttataatttgtggaatgactgtttaggttcctgcgagtgttttgaagaaatggtgtgatgataagtgtatttataacatacttcatgttttgtggccaagagcttgtaatgttaattgcttctttcataacaataccatattagagaatagtatgcaatggagatttaacttcttgcaggacattcaactgtattacaaatttctatccagaaaaatcacagagattaagaagggaaatagggggcacgtacagtgaaggacctgtgcagactcgtgcaatgccagcaaatagcatgccgagggagaggtgtttttgaagtaattgatttctagctgacatttttcttgccagggaggaaataatcaaacaattttagtgtcactaatagtgagactaaagttgcagctgggcacagtcccataattttctttgtttgagtgaattccagaagccattctccactcagaggttacatcccttgagaatgtggtgctggtggtgtcagctggaggggccatcaggctgcgggggggggggggagagaagagaaggcagggtggttgcaggagtcgcctgtgtgggaagatgacccacgaggtctcatgcttatacatgatctcagctttactcagcatggtcttcttctttagtaaacaaacgttctcaagttttgaatttttgcctccaacattctcgttctcctgtcttgtccatctttctaccgctttctgtgtgtcttggtcttactattatttatttgtagaattttactatttatttattgattggtagaatcttactttggagctaggctggccttgaactcgttttaattctcttgcctgagtctcctgaatgctgggtttacaaataaatgcctggctcttagatgggtctcccctcacaggccccacccccaccccagagtgtctatctctaataaaaatctcatgtccaaacacatttcccaacagtgtcttcagggctttgctgttaccttatttgtgaagctgaggaaggatacctggtgtaggaagaagaaagatgcactagacatggtgtcatttggcaagtgctctgatatttgctgaacgtctttagacctctcaagttgataaaagtagtagcaagtattcagggtttccatcttgcagctcgccctgaccattctgtattctgcagagagcccagatgtgaagtcctcctgaagctgcttaggcccagagctcctcctctggctccctttgtaaataaccatcctctctacgcggtgggcagccaaatttggagatgattatctgatgtttggagagacaatttctttatgttagtgactaaggaaaacaaagaaacaaaccaatgaacaattttttttaaaagctctgattcctggcattgcgacaactgtgtggtatgcatcatcatatttcaaactccaaaacaaacagggcagggagaatttttagtctttccccccccccttttgatcactgccccagccctactattacatttgatgcttgtggataggaagactttttgaatggaacaattgtgacatttctttcaagttctccagggatttttatagtatgcttaattcactttcttcctctctctttgctcttgccccccacctccccaaattgcttcctgatcccagactacttacatagcatgcactgtgctccagaaacagcagagaatatgagaactaaggtctgtgcccttttggactcacattctgaagggcaagaacagatctgaaaacaagcaggagggaatctataagacaatgcaaaagaaaatgtacaggcggtgacagacaagggaaggaaggaaagctccttaagtggacggatgctccagaatatcactatcaggagacctgaagattggaagaaaaggatgagccagtgcttgagtgtaccaagcccaaagaaacctaagaatgtatgaggtggaggggacaaacaccaagtacagagtggcagtgactgatgtgtcaccagggactgaagtggaggccatggtggcttgtgcaaagtgaaacaaagtcagttccgatcaagctaagtaggacagggttgtatctcatagtgtgtgatagtctgcttggggttttgttctcaacgtgacaggagtttggggatgggtttagaagaaaggaacaacataatttgagttacaaggccaccatgtggagactgccttgtagaggctgtgaggagaaagcgaggcccccataaacaagcttttctccatctactttcctggaaccagggccatgaggaatctacccaactgccagttctctgattgggttttattcttcctgtgtgctaccttcccccaacaggtttgactatgagggactggagcccaaggcaacatactacatcatgagggacctggaggccctggttacagacaagtccttcattggccagcagtttgctgtggggagccacatttacagcgttgcaaagacagacagcttcgaatatgtggaccctgtggatggcactgtgactaagaaacaggtacttgctggggaatcatggaaacaggtggattaggcaaagcaggtggacaaagtgtgtaggactggagaaatctttagggggtgtcttttctgtgctcttcagttagaacaatagagttctccatctatgaagaggaagccctcaatgaaggttaccttattactggtggagggtgaattagaacctgggcctctcggtcctatattgcttatacctggtaactgatgaatcaagacctctaacaggaataggccccggatttccttctttaatggtagcagcctacaagtgcttttatgtggtggctattcttggtgataaattcagagaagttcctagagcaaaatacccctgtcgttgggatctcccagtgtatggtacttcatcttctgttaccctatgtcatcaaggaaacataagggcttagataaattcagtctcttgggagggaaagaatagttggaaagttttcctagaaatcccacgtggaagattcatggatgaatgctaatctcaggcaagtagcaaagccagctgcagcttcaattatgctcttgtttttgtgaattgtatgagaaaagttgatgtctctataatgatttttcccctcccagtcttgtgtatttattggctatagcaagtactaacccctctggagcacatcacagacattaacatttacaatatacgtaatacaacccgagtaatgttaagagcagttgagttcatgaatccccaagttcttatctttttatacattctttgtaagtgaagacagtaacagaaggcaggtgctgcaggtgtttgggactagatatgtactgctatcctaatttaactagtatttcccctgtaatctttattttgaaagccccaacactgtgggtactccaaattccagtgcattctttttttattctcttggtactgcctccagttggcttagttttatagttatttttaaaatctccatcaaatatcagtgctttgggctggggagatggcttagcagttaagaacatttgctattacagagggccaggttcagttactagcacccatgtggtagctcaaaaccatccgaaactctagtttcagtggctatgatgccctcttctggtttctgtgggcaccagacatgcacatgatgcatagacatacatttagccaaaacactcaggtatgcattaaaaatgcaaacaagcactaggcgatggtgatacatgcctttaatcccagcactcaggagagagaggcaggtggtagtctctgagtttgaggccagcctggtctacagagtgagttccaggagagctagggctatacagagaaacacggtctcaaaaaaacaaaaatgaataaatagataaacaatgaaaacaaggagtccttcattttagaagtccttcaggtcagctgagaaaggcaaaagtagtcaagaaaacagtcaggatctggaagacagaatggaatcatgccacttgctgtgtagacttcagggaagttccttaattcttgatttcttaggcccatacttttgtctccatccatgcgcacaattgtttcagaaacagaataaaatatgatagaaaaatataagttttcctttctaagatagacaaaagccctgatttttcttttgatagggagaaccccacacacctgtggctcttcgtttcaccaaggatagttcttgcctactggccttgctctgaaatagcagcagtgatgcagccatcagcagcaatagaaaaatggggtgctcatatgacatttttgagtccctatgtcctgaatacacattttcgtgttttgtttcgctttccctccagaccagcctgccttgtgcccaaggtttactttgtttttgttgccattagattcgagagacttgaaatatatatatatatatatatatatatatatatacatatatatatatgaaatatatatatatatattatgtatatatatatatatatatatatataaaaatttaatagaaatatatagaaataaaataaatagaaatatatatatatttctttttctaaagtatgtttctgggtctacagctctaacaccctgagtttcccccatcttgtctaaagtatccctgtgaggtttctagcctctagagaaagcttgggaccctcttttggggttactggtctagatacaactacaatgaagatgttatctagccatgggaagcctagctgctgagctcatttatttgttgtttgatccaacatttctctaacttacatctttcctgggacattaagtattcagatgggatcatcttagatgcgctttaatcagtcacatcaggccacttcttcagctgggtctcaaattctgatgtacgtttatcccagtccctttccctctgtaagcacacatgctagttttcatttgaactctggatatattaatattttcctttctacactgttccacctgagctcaaatgtatttataaatagatcagtgttgccaagacctgctcttgggaattttctggtaaagaagaaaaaagactgttgtaacatgaaaagtaattgacccagagactgataccggggttcaaacttcaaactgaagatcagaaaagcaaagcagctggccactagcttcttaactctaccccaggctgaatgggctgatcctgtctccaccagctctcaccaagcctcagactataaccactcctcagcgtggctggagaatgaatgcctctactgaatcctgatactgacttatatacctctcatgagtcctgggattaaagaggtgggctataattctcttttagactgattcaatcttgtgtaggtctgggtgaccttgaactcacagagatccatctacctcttaatcctgagtcctaggattaaaggtgtgtaccaccacgtcctagcttctgtctgctgggattaaaggtgtgtatcaccactgcctgatctctatagcttgagggtggtggctttgcttttctgaattatcagtcaagctttaataaatcatgaatagtatattactatagactatctccttttctctcatatcagggctctgtgagtgacatcttcatgtatgggtggttccgagccctactgcagcttttctgcaggcctgggtttggtttagtgagggtgatgagggaccagttaacactcagctcatgaatgaattgtcagctaatcaaaggtggctcttggcacagtttgttctgttggttgctgtatagagggactcggcacagtagggttgtgcagtctttggggttatcagcagacaccaactcaaggatagttgaatctaaggcacagttcaggtaatattgcacaaaatctgcacactttctgagtgatagacacttaaaagacacatttgagtttaaattagcttgtatgatttcaaaatagtcatggagtgcttgggtagactcactgagttgatatttactgagagtctacaaaatacataattttgggtttttatgcatttattcattgtgcagttttctaaacataaatatgtagtgactttatagtcatataatgtacataccatacaattcactcatttaaagtgcagatttcagtggtttttacattgacaaagtaatgcagtcaccacctcattaaattttaaaacattttcatcactccacaatgagaccttgctcattttagcttccctctcccttccaacacccctccagcttccaggtcctggcaatcaatgacctacttctatatctttggatttgtctattttgggcattgcctctaaatggaatcacatgtggtctttgtgacgtgactgcctattctcagtgcactatttccctggctttccatattatactgtataccaatacctcattccttttaaagctgagttgtactctattgtgtggatgctacattttgttttccgtttgtccattgataggttttcacttagtgcagtttccatttttgactgttataatgaacctgctgtgagtgttcacatgcagttgttgtgcagacatgggttgatagacaactagagtgcagttgttcagctaaaccttaaaggagctgccatgcagtcttcaaacccagttctaccactttccattctcgccagcagtgtgtgaggggtccagcttcccacacttggctaacatttatgactgtatctttttgatttttaaatactgttgttttcaaacaacatactatactgtggattcctttaaaattaatataggggcagagtcaagcatagtctttctctctctctctctcacatgcaacacactcacacactcacataacacatgaactctctctctctctctctctctctctctcacacacacacacacacacacacacacacacacacacacacacacacacaatcctggcacccaggaagctgaggatcatgactctgaggtcaagcaagctaagaccaggcctaaaaaaaagagaaaaaaagaaatgttataaccataggggacaacagcagtatccaaaacacaaaggtaagctggtaactgtacatatgccatagaagacagctcactgtcctcttcagcatcttattcctccccggcactatgttgtcctctttggcatcccattcctctattgtttgaaatcagacaaacacagctttaaaggctgtctttgtcactgtccagatctttgctgttgggttgaagctcaacttgagaggcagtagtgaatggtgcccagcatgctagacgatatctgagggaaacattctacagagctctggtgcaggggctgcatgctagctaatccacacacaagaaatattccttctttctctttatccagaatccttaacttgaatgagcaaaggatacattatttccccttccttctgtctttccttccccattatgtccagagctgtgtgtacctacacccatgcatgcatatacatgcacaagtatatggtttgaaaacactatatggcatgtactagtgttagaaaacattgtggtaagtctgtgttctatcttagccttcgatgttttgcagtgaacgttgaggctcaggtgagtgatcccatggtagtgggtgttcgtagtttgctctataaattcaacttactagagaaaggaattagataacatacatggctttcaacaatgccttttatacaaaagttttgatctttatttgatacagaaattatctggtggtttttgttgctgttgttttttgcttgtttgttttgtttattttaaggacagagtttctctataacagtcctggctgtcctggaactcattctgtagaccaggtggccttgagctcacagagatccacctgcctctgcctcctgagtgctggcattgaaggtgtgtgccaccattgttcagttaccaaaaatcatcggtaagcacagcattgtgctctgaagtagcctatgcctcatggcactgctgggaattccacaagcaactgtgaagggtgtggtcaggaagtctaaggattggaataattcttccacctttaaagtcaaaattttaagttctaatttctgacttgattttccttctagcttctgtgacaaaaagccctgacaacaatgatttaggggagcaagggtccatttggttcacagttccagcttatagcagaggtgtcacaggccaaatagtactttcttctgttttcatgtcacatgcattatcctctcttcccccccttagatttctttctcccctcttatagacctctttcaaatcctcttacacacatatatttcaatctatatttcacatataagagagaagtatgggaaacttgtctacacctggcttatttcacctgacataatgatctccagttctatccattctcctgcagatgtaatcatttcatttttatttacagttgaatgaaacttcattatatatatcacattttatttatccatttatctgttaatggacatctaggctagtttcatatctggcctgatacatgtagtacagcaataaatatggatgtcaaagtatctctggggtatgatgatttagaatccttttggtatatacctaacattgctgaactaactgcatggtagttctgattttagtgttttgggaaatttccatgctatcttcatagtggatgttccagtttacactcttaccaataacggataaggcatctttttctccatattctcaccaaaatcaatcaataagaaattttttgagaccagttttcacactgtagctcaggctatcctggaattcattatatatcctaggctgaccttgaacttgctgagtcaactgcctagccttttgcttccctttttttttttaacatttctttctttagaatttcatacttgagtacagtatttatgtcatttcccactctttcccctctgcaactcctcccatatctcatgcctccccactccccaaattcataacctcctcttctttaagtattgttgttacacatatttgtgtatgtgtaatatactaaacatgatgagtccccttagttttgctcatctgtatattgtttagggctaaccacttgggattggaaaaactatcagggtctggtcatgggagaagactgatcattctcttagtagccagtagtggcctgtaactattcccccaaagatgagaccttgtaggatttccccatctactttgggaagatggctggtgttgtcattgtacaggtcttgtcaaggtgaccacattgttaagatttcatgggtacaactctttgtgacatacagaagacgaatgttgacccttacatgttgatctcatagtctttccacgccctcttcatgatatttcctgagccttaggtgtaggggttgctatagagatatcaactggggatgggcaccacacagtcagttattctcttcatttcaaccagttgtgcatttctgtattggcctctgtctactgtaagaagaagtgcctttgatgtggggtgaaagctacacttacttgtgggtataaggataactatttagaatgcagttggagattatccaggtttaggaaagtggcagctgtaggttctccttgatggtccatgacctcacaagtcacagttagttggctaggtttacactaccaggcatgaactccctcgtattgagtggaccttaaatctgattaggtgatcttccaccttcttgatgaatttgctctccctatggtattctatctgagaaaataaaaataataaatggctacatgacatagtcactgggaaaattaagtactacctgtgaattcctggcacaaaaggaatattagcaaatgattaactaagcttacttaagcaaccttgagaacaccagggatgtaacagtggttgagcattgtactaccttgacctccaacactgtaacaaaggaaacaaaaagaacatcccgtgatggggagatctggccatttgatgagccacataaagcaagaaaagcaaaggaaagatagactgtcagggtgtcttgtgaagattggagcaggcctctggtgtctgagtcatcgctcaatgactcaactcacatactccctccccaccatcgcccctcacctccaacacattcgtctgactcataaagagaatggttcttataaggcagcgtagtcctccctttttgtccttaatttgaggtcagagtcaggaaacagataacgggggaaaagccattctgcatgcatctctaaagttgaaatgcttttccaaccaaattgaagctaaaattcagttgtggtaataagtccctggccagcctcatgactgtggaaatatctagggatgtctgtcccacctgaaaccctgcaagggtcatgccagaggcaagaaggaagccctgaagtgctccacctcatcttgaattccaagtgcctcctctaccctgagtggctttccagacttcatgggatttgctatgactggttttaagatgtctggtgtttactcttttcggaaccaagagtctattggatttagaaatcacagtttaataaggtgtggtgccactgcagttcttccgtgttgttttgggggaatctgtcattgtttattctcaggtaacattgagtcacatgagtgtgaccaatggtgctttcttcaaagacaagtgggaaaaaatgagccaatagttacaatgtgagtaggggagcagtttgatcaaattactgagtagtttaagatgtttccagtgtatgccctgtaacaagatgagggaaagtttggcaagccctgggggtgtgagtcttgcttcaagggtgaatttgttgtgcagatatccagggcaccactggtgctgggtctctctcccttttaccaccaacatcccagggaactttttagtaacaagatagtctcctagcattgcctcagcccatctacctgtagcctcagtcctgtaccctaggtgcctacagctatgagactcttccaatgctaacagtgggaaacattttagtcttggtcccgtgaatgaatggcatttgggaaaggtgatgacacaccaagagctggcgtactgggcctccacccagaactatagcctatatcatgaaaatttgtttttaaatgagcaaacttgatacttcaggaacacaacttaagcaactgagacttcttttttctccttatccacccaaatcttctgtatttccatttagcaggcacaaaaatcagaaaatcctaccagtggtgaaataatttgcaagcaacagttcagctgatatttaaaacttgctgtaaataaatgtgcaccagctggctaacaaggagagccaaatccagtttgctcaggggtaactcttagctaactctaggcatgttaatgcttcaagttatgcaggctgcatggaagcagttgaatgttctcctcagtctgagaggaagaaattcattcagaggaaagcctactcagaagagcatttgtttccagagttgttattttaacacctaggaaccaggtctgtcctttttaattgcagtatttaggaacaataaagaacataaattggcagtctggaaatcacaccagttctgggacatggtgctggacttggtccctaggtgccatcatcttctccacccccgacctagaaaagtttactgagccaccagcatctattacattatgcaaaggccaccgaatggtgttagctgaggatgctggagctccaaagccaagggcttctctttctagggatagataactgatccaccttcagcttcacctgtcaatttcagtcacatcattatccatgaaccacccgagagactataacagcagcaaccgaccatcgctctatcacgtgccatttactggagtgtagtttgtgcatttagaggcagaatgttggaaatgattccgttggaatggtgagccaccaataaaatttatttaagtctgaaagctggcacttagacccttctgtgtggagcaacagaagtgtgtagttaccataataggtatagtgtggtgttgaaaaacaatccctgtgataaatatgaattcctgtcctaacttaggaaaatatggagaaggtagttaaagtcattatttcatgctcttccccattagataagtgtttagcacacaggtgctgtatgccactcagcactctggtcctgagaacccaacagtaagcagggcagctgagattcctgccctctgcttaattacactttagctggagaggtaacttaacgttgagcttataactattgtagaatttattgaatagtgttatggagaaataacttagttgggcatgtatattcgaagaactaaggtagaccaggattctagaaaactcttcagatgagatgatggttaagccatgcccaggagagcaagcaggtgagaacattgcatcatactccatgactttcttcaattgaatgtaattagatgactatttagttttcttgacaatgagattgattctagacaatctcatgcggtattatgatacctacaattgaaattctggactttaacacttctgcaacactgtagtcatggcaaatgaagacaacttagctgtctgctttgctaaacaggcttcttagtggtacatcttgcaaactattagataaaatattttctagtatacagtttccgtgaaattttcctatttgtccttcaaggatgaaacacatagtcaattctttacaattacctacttgttactgctatgaacatagattgatggggacatggtttcttattagttgggagcccattccccccatttctgcttctagagaattcaattaaaatgaattaacctctcccgggaaaggttggtaggtttagggctgtcttttaaactaggaggaacatctaagtgttcttccatcacaagtactttctgttgaaatgctaatgtctctgtatgctcaggaggagacagtacagaaggcaaggccacatagctagctccacaggaactaataggggaagtgcggctgtgactggagggaaagcatttctgaatccaaagtctcccagagccaaggccagtgtggtgtggagtgaacagcgatgagcaataattctagccaagaaatggatacatgtgtgtgatctgtttctgatggtctgcattggatggttaggattttgatgaggaaaacccaagcagcttctcatttgctatcttggtgctttgaaagagcatctaagggaccatttggttttgattttacccagataattctttcagtttttctaattgttggacccaaaaggcttgttggttatttttttaaagaagaaggaggaggaggaggaggaggaggaggaggaaagaagaagaagaagaagaagaagaagaagaagaagaagaagaagaagaagaagaagaagaagaagaaaagacatcctgaatgagaatggcccccataggctcatatatttgaatgctttgtctgtagtggtggaactgtttgggaaggactaggaggtgtggctatgtaggggggtgtcactggagatgggttatgaggtttcataagcccacattattccctgctgccgagtctctctctctctctctctctctctctctctctctctctctctctctctctcctccgccatccctcctctttctttgccttatgcttgtggatcagatataagcacttaggtactgttctggttccatgccttcttgcctgctgctctctgccacgatggtcacatactttaactgtctggacccttgagtccctgatctgcatgctttcttttataagttatcttggtcatggtgttttgtgacagcagtagaaaagtaattaagataaagccttaatgagaatgtgtctctggataggtgtgcggtcagtgcactgtacaaaggaccctggcctaatgggaaaggcaaagccaaagtctgcagctagccaagaggagagaatttttgtgtccctttcccacccagaggggggtcccattttgtaattcatacagaggccctgtatggactagctgctgccttactccattatttttgaactcatgtttccaattaattccatggcttaagtaaaggaaactaggcaagcccgtgtagtgttgtgtgtgtgttccatccaaatcccctgctctatgggctgcatgctttcttttacaaaatatggttcagatgttacatggcaatgttttcaccttgacgctttccagataaatggccgggatttcctgtgggagatagcatccacattaggcccagactatcttccaaggttgttctgcctccagggtcacatgcctcatgtggccaactgactgtacatgtgatgctgtacaagatttcagggccatatgctgctttcccctggaattcctcctacatcagcatttgagtaagtcagaggctgccaatagttgttggtaaagcacagttcctcctcctgcctggctgcaacatgtcctacagtctccaagctaacatctggcggctctgcatggatttagcgactagcagatctctctgccttgatttacatgtgggttaaaaaaaaaaaaacccaaacaacaacccctccaacattcatttatcaaacatttatcagatacttactctgcatgaggctccaagtcagctttgaggctcataccaaacaggagaaattggttagaggtttgcatgagaagtgatgcaggaacatgagttctttcctgtggggtagcattcccccgtgtcaaaagcaccccacccaatcagtcagaagacctagagactggctcactgtgttacaacactgagccagttttgacaatttcttttcttctccataagcagaggaaatggccaggatgacacttgaggtgtttcaggtccttaagtgtctcacaagtattctattgctgaagaagccatttcaggggctgtcctgggggagataatcatcaggagactgaaaaaaaatcaacagtgtttttcaacattctggaaactaatcttaattctgcctaatttttaagaagggccagtgagatggctcatcaggaaaaggcagttgccaacaagactgatgatctaaattcaatccccaggacccataaggtagaaaagaaccaactcccaaaagttgtcctctggcccccacttatacagtgtggctcctgcatgtgctaccccctgcaatacaataataataaaatataataaaaataaacaagcatgcaccattacagcatgaaggttttatgtgataatcctattcaaaatcattcagctctaacataggaagaatcacaagtcttttatgatacttgatgaagcacttttcatacacagtttctgatatgatgctcccagccaccctataaccaaagtcaggctatttttcatccaacttaggaaactaaggcttagagagcttaaatgacttactcaagaccaccagctagtgagtggccaagccagaattctagcctgggtgtatctggttgcaattcctgaactatctccaaactgcctgcgtgcagtaaatcaaagaggggcaaatctgagatatcaaaaaaagaaagaaagaaagaaagaaaagaaaagaaatgttacagtggtgtctggatgctggtgggatatttgtgtagagagagctgtatgcagtaggtgatattgcaacagatttagggtgaacccaacttttctctcagcaatgaggtgagcatggcaggcaaatttaaggcagggacttttataccacccagccccataatttaccctatcttctaaaggagacaaacaccctctcctctctctctctctctctctctctctctctctctctctctcgtatgtgtgtgtgtgtgtgtgtgtgtgtgattctgacattctagctactgtagctacagtcatagactccttcatgactgttctgggaattccttagaatgtcatgctaaaatctagaaactgacatggagcacaattcagacatctgtagcatgaggcagaggacacacagagaagacattattgcagtggtcttgattgcaacatccatttcatccagagagtcactaaatccaagtgcccaagggactccccatacaaattcaatcaccatgtctgggccaaggcctagcactattgtcttgtaaggacaattcccctcccagataattccagtgtgcagtctgtccgaaattgtaagccaggaagccacattggttcagcttctattgttttagacaaacttgctttgttttagcacattgtggcaataaaagataggctagtaaatgtaggatgttgacttatttataatgtgctggtgatttctatctctaatatcaactaccttctcaggcagagccattagccccagttcatcatgaagaaatgtgcatttgttttcctttagctaaaggtagaagatccttccaggagtgcctggtgaggtccctagcattgctcactcattgttgaacatggagtgacatcaactaacaagtgtttatggagggcctactctgtggctggcattgtcctgactctgtagctaaagtgaaggtgtacatggtgtgtgacagtcttcctctcagtgttaatgagtgatttgaagacaaaacatagtagagcaaacactcgagtgtcaagttgccatgggaacttgttttatctttttgctctgggccttgtctgttcaagaggatttatggcagcagaaacacataatgaagctattagaatataaataagaaacagaaatcaagactggggaatgtataaattagaatgccaagaatagaagaagaaaaactcatagcttcacgagtcagagagatccacttggactcaacttcaagtttagtgttaagtgtcctggcagccatattgagaagggaaatatggttagttacaaagtgtttattgtcagaaagcaaaagtcaaccagttcctcagggaagaaaaggctttcaaaacacttgacttgtgagagaatgtctcatatctagtttcataccgtctttgacaatattcctccagactgggaaagtagacattataagacagtgtggtatagcagcctgcagtaagagcgagaatggcaaactaaagttccattcattaaatctacttacagaaggagtcggtggtcagaagtcaacagctttgggtcagatatggtccagatgcgtctatagttagaattggaacacctgggaaatgaatgggtggaatcccttgatgacaatcttcatcatcatcacttctctctgctgaaattttgatatggcagctggccacattttctgttttttttttttactataaggttgaagggtaaattccaggtagtgcatgatgtagttgtttatacccaagaccagcaaacacttttgtagagaacttataataaaatattttaggccttatgcactagatgatctgtgccacaattattagtctctgaaactatagtacaaaggtagctataggcaatccctaactgaatggacatagttgtgtctcaataaaacttgatttaaaacaaaacaaaacagagggtgtaacaagtttcaccaacctctgaaataatctaaaccacaacagtgacaacaacaaatgaagagaaaacctattattgctgttcttgtggtgaaattaaggaatgaatgataagaagcttggcaactcttgtttaatagtgactttggccttactgctttgttcatggtaataatgattcatgctagcaagaacatggctcatgtgtggactgcaaagtcagtatgctcattgaaggaacatgcagatctcaaagaaatccaatctaactcttcacatgtagaagtggtattcaccagacatggtgtattagttctgtttcttgttcccaaatacctgagaagaagagactgaagagagggagggttaattttgtatcacagttgctgtagatacagttcatcgtggtagagacagcatggcagcaggaatgcaaggctacatgcaggggaatgctggtgcttcgatgtctgtctcctttttcccattttaattagttgggattaaagccatgggatggtgctccccccatgtagagtgggtcttccctcctcagagaatcatctctggaaacaatcttacagatgcaccctcagaagtgtgtctcttaggtaattctgaatgaagtcaagtcaacactggatattaattaaccttacacatagatacgacattgcaatgaagaggtggggttggtctgaaaagtcctgcgttccatgcagagaagagaattgtgatgttgactgcctgtaagggcttctcaaacaacactgattctcaattaagctcttatggttggtgttctagaaggagagatgatggtaagctattctcagtaggcagatacatgccattcactcaggtatcatttcttcaagctcaaactctcttcctttctactaattactaataatcttctatgtgtgtagcatgcagtataaccagtggggaagtgatttcatttgtaaaggtttagatatgaacttattacaaattgatgattctgtatgaccaaaaatcctatatacctcccactggccataaacaaacccaggaagttcactgtgtggtggaatctgtctcaaagacttaagtcagggaaagggctggaaagggtagctcccaagttattttactcttgcagatatggtgtgttaagtacctcagccttagaattgctttaatcaacttgtaaacaagccatacatagtcctgggagggatgaagtttgtgctggttgccctatattgagacaatgagaatgtacgcttcaacatcactaacagttttgaaagcatctgtgaaaacttaactatgagcacatctgtgggacttccaggggtctgtgattggtttgaacatcattttttagcaggcatttccggatactaggaaatgttttcttttgctccatgttcactgttcagtgtgtttgctccatttgggatttgttgactgttcagctctctggtggcaaaaggtagctagctaataaatggttttttgatgattgtgatagatgactccaggtttatgaaggacaaacatgtgtctttgccttcataaacctaggacatagcctagcacttactccatggggccactttcatgttaacccaatgagtaaacactagtacttggttgccaatacgggagctgattccaattggtttatgttgaacaattctaaaagaaacaaaagctttgcatttggggattgggacaaagctttgaaaagtaggaaaccatgcagatgagatcagatgccctcttgtatcaaacatggtcagacttgggatgggataaggaactggcattcagattcacatagcaggaatggtgtgattttagtgatgctggttcatagccagcaggactggagaccagggacatttccatgacaaattacttagggaaaatgtctgacattgaggtcatcttagacatctactttttatgagtggtgactggtagacactcttttgcttcctctttcttcctctggtctttctaatgctttactgatcagatttgctttgttagctgccttagaatgtattttcatcagtagtctgattatgatcttatggtcataaaagtatggccatattttaaatatccctgtcatgaatgaggaaaaaatacatagaatgttatattgggtagcacttaattcatctggccacagctctgtcctgaccccaagctggtgcccagcatttctagataagaaagagatggtcatctaagataatgaatttgttctcagcaacactcacagcccggaggagggggcagccctgatcactttattgtggggttctaccactgtgataatggggaaggggtaaagctaagcctaacagtatacagggtaacctgaaccttaaagtgtaaaacggttatttagcaattgatgcatacatgtataccagctcttgtaaggtggggacagggtcttgagttcagggcctgctgggtgacatggaaagactcagtcttaaaaaaagggggggatggggtggggagggaaggagcagagtatttcttttctttcttttttctttttttcttttcttttttctttctttctttctttcttttttttttttttttttttttttttttttttttggtttttcgagacagggtttctctgtgtagctttggagcctatcctggtactcgctctggagaccaggctgacctcgaactcacagagatccgcctgcttctgcctccccagtgctgggattaaaggtgtgtgccaccaacgcctggccagagtatttcttattgcaataggtaatttgcttaatgcctattgtattcagatttatgcaggttacaccatggatttgagaacatttattaaatggtatcctatttctgttgtcgccgctgtttttacaatcctcatattactagaccaagaaaatctgagcacatggtcatagtttggctcttcagcatctgccaacattagccacaaagcaacagaaatagaatcaagaaacaaatggctaacctcaagtagcttttgggtttaccacagtgatgtgcttgagtgagcatccagagccaactagaaattggcatggccctgatgggctttggtgtataggactgttctgatttctgcaccatgtattggttatcattgcctgtgtattcttttgttcactgagccatttgggatgttcttggtctcagggcctgaggatcattttctccgatgcatcacgactcatattccggctcagctcctccagtggtgtgcgggccaccatcagactgtatgcagagagctacgagagggatcccagcagccacgaccaggaaccacaggtacacaagcacagctctgctcttggcattgagtgtcttcccctaaagctcccatggacctttaatgaaaagacatattgatagcttcagtgggagtcgagttgtgtgtgacctaaaccaacttcattcactcattgaagtgtttgaggcagaagaacttctctgtaatgataagtctttactccaagacgccggagccctgctgccacatgggagctttctgccaggccgcccaagttctgcccacagtcatgttaatgtcccaagtaacacacagagacttatattaggtacaaatgctgcttggtcaactgactagcatttcttatatgctagctcagtcttaagtatcaaccataaagacttatgtcttctcttgcccagatcatatggcagctccagagcagagagcaggaggaagagaaaaagggccaacttccttctttcccttgcttatatatgagtctgcctgttatgtcacttcctgcctgtatcaccagacttctttttactacatttcccagaatcctcctcgactcctactcctgcctaacttgtttttctactggccaacagtactttatttatcaaccagtaagacaatcatatacacagaaggacctcccccatcacttctctccaggatctaggatgatttcaggcaaggatttcccaaataattcacctctcttcagtgtcctgtggcttaatgtgggttctaataagaaaaggcagattgtatgcataagagagtcaaatttttcagaccctttattgtgctcatgtaaattattaatctttaggtgttaggaaaatcctggattggaccatggcattgaggtaaccatacaaataccaccctgggcttcctctctcagactgaggaaacactcacaaatgttttagccataggccactgtacttctacatttactagcacagcagacagactgactagagactgactagacagaagagaacccactccaccattgggtgcatcatgctgcattgctggatgctctggtctctttggtctctcctttcatctggctttatgggttcttctggactgaaacattagctgtgcttctttctgggaaagtggaggggcagaaatccaggctatttctcattgtgcagttagccaggatttccagctccaccctgtgtcctggggcaatccccttttctgttgatagtatagcttgttcatgctgttttctttggagaatctcaaagaacttggtcatcagtgtgttgtggattcttctacctactctagtaactcaaaagtctgtgggaacaagatcatcccacatggggaagtagaggctgggagtcattcttggggtcaccagggcataagtggacagagcccatgaccagcatttagtcctggcctttcctctcaggagctgtccaagcagggatgggccatgctctgacaaaatatcttgttagtgagtacatttcactcgagatagtaccaagccatgcaagaactagacagagacttacattctctttccaaataaaactgtcttctacgtctcatgctgagagctgagctgaaaggcaggagctccgaactggctgaggaatgacatccctggcctccccagctctgagtcattccaacttgagactttttttcttagcgttcttttccctatttgcactggacaagtggttaagacacttgcttatttttatttacttcccttgctggacttcatccaggccattaggccttccatacacaaatgcatctctgaggtggtccatgaatgcaaatggcacttttgaaaaaggttttccttgaagccaaaaatttctccacaggcctgcttttagatggttgtgtgggtaaataaaacataaatagtgcttgttttagttcccattactgcatattttccaccctgttggtgtactagtttaccagtttgatggccaaggaatcccttccttaatgtttctcttaggatcacagtcattttctccttctctaaggtctttccctagaccatactagatggggctcagtacatttattttagcacatgatctagctaaaagttctgtattaaaatagaattcctgattaaaatagcatgtatcatcgactattgcataatacattgggatcatgatataatagtcaaaatttgaaagaattctaacccccataaggaaaaggcaggggagaggggatgggagagaggaagacagaggagaaggggagaagggagggaggcacagctggcttacccacattaatcactgttcagcttcatctaggccctccccttggagattttaagtcttttgggaactgttgctttctggcacaaactgcattttccttctaagaaccctgagaggatgaaactttggttagccattaacagagataaggacatgacactgaagatgctgggttactactgacaagaggcctaacaggcaaggaccagtttgtactttcttagattctacttcagttttgttatctagattgcagagaacacacactcctgttaaagtactccccaggctacagctctgttaagttttactcaccccagtgctgtagtcatctacattctagttattttgtatgaggacagagttcccttcaaataccatactagtatctggctatttgacttttcacatggattgtttctttctcagacatttaaagcacatgaggaaggcatttttagacattagacttgttacctcaaggaggaagtgttcaaattaggcttgtgatccaaccaggaaacgctgtgacttacacgggtactactctcgacccctccagctagagtttcagctatgtccttttgtagaggtgatcgtgccatgtgttttaagttgatgtcaagtgatcacttcacccacacaaactgttttaaagtattctctccatacttacctatgagttggtggtgaatggcggaagggcacgggaaagggctccggagggaaggtgtttgcacagttttggtccttggtatatgaaaagagaaagcctccccaacatcattttcaaacacagttacttgaattttactggcagtcgggcccccaatgagttctcaagccagctggtggcaatttgtaaaaagggctgagccagaatgtattaaattcacaggtaactagaaatgggaggttgtttccctattctttccatctcaattctcagcaggattgctaggttaacattgtgtttgctttattcctttgtccataggaggccatgggtggagtagccaatgctactcacagtcaaagggaaaaggaagaaggttttattaagggctaggttatcagagaatgaacgtcagcttggaactaatcaagatggaaccacacccgagcccactcaagtcttgggaaggagccagtgtccttggaccttcctagaaactgattttaaattgatggatttttgataagttgcatctagcaaaagtgtatctaaagcaccagagatctttttatgttttattcacacgtcaccaccaaagcccacctgtcattttgttctaacagttcttataagaatttatagttcaaaaacagacaatatcgagtaattttgttgtctgtggagagaatggaccagccagggcacttttgagagtgaaggtatctattaatacctgttgagattggcccctatcaacaggccttgtggttattctatcaacatgcttccatcctagtgtagaactgtgtggcttgttagatgagggaaggagtgaagagtttgatcagagaggttcagcccagactgccatcagaaccacttggagagatctatagaaacatttatagcaggcccccattcagagattcacttagcctggtacaagactttcgatttgttgagatggttctaatgttggtttttattgaatctgcaatgtgtcgggttcaattctagattcttcagatacactgttatccctcatttcactgccctcggggtgggattatcgttagttttgcaaaagagaaaaccaagatagggagttgttctgatccatgggacaggtcatttctggattagttttgttttaagaaagacttccaaccagattaattgttgagtccaaagagcggaggatttccacctgagcttgagttcagtgctgcctctggaagtttagttcagttttgttattaagaagtttgccttcaagggctggagggacgacggctcagcagttcagaggtttgtagttccacatttatctaaacatcaactgtgtcccaaggactcggtaaaattcaattcgatttcttttgcctgacttcaggaaatggctctgcttgatttttactggtttcttccagaaggttcagctcagggatagctaaggaagaattatgcagggcctggtatgtgggctgagtgaggatttctgtacctctccaccacgtccccacccccaccccctccttcctatgagttctcccacccctcttcagggcattttatggaggcttcattactaaaatttgattaataaagccattgtccttggttgttgaacttacattaggggtcagggagtcgccacaagttcaaagtgtctaaccacatgggtgtatgcttgtcacacagcgcccaacctgaagacaccttttaagtatgaagttgggtgtggttggaatctaatcaacacagacacttatcacccaggaagttccaatagagttcgatctaggccaggaacaaggaacaaaacattacattttaccacttcagacattacaaacatgggtaaatggtgagttttctgccccttactttttattagcaataagtatgttttttacattattgaaaggataatgttcccagtacatactggttgtgttttgtagcaaataaagagtctggaattattagttaaaagcctgaagaatagaattggaaattgaggtattcatgatgtgagagttggaatcataacagacttaaaagtgacacaaacacccagcactcgggaggcagaggcaggcggatctctatgagttcgaggccagcctggtctccagagcgagtgccaggataggctccaaagctacacagagaaaccctgtctcgaaaaaccaaaaaaaaaaaaaaagtgacacaaacaagcattacttagtcagtgcattttcatgatacaatgaaaacatgtagatatgcatgagtatgcattgtatacttgtgtgtctgtgaaagagaaagcataattttcaagtcatatgataaacacataataaaacgacattttgttatctagaaagaaaatctgcataggaatatcttaacagctacatgtttgaagaaatccatgaggaaatacttcatttttttgtttttgcctcagaatttagtatgtgttgctgtaatatggctcagagcaggaggaggaagatgcagagagagagtttagagaagaaacacgtgtcaaaagagttgggctataaactctatggctgagttaaggagctggctcatttccttggaagacatggatgacccagacatcttcagaaatttaaaaataatttgaggtgttgaaagatgaccagctgttcgtcatagctaatgaatatgtaatttgaggaaataaactcaagctgaaggaggagagattcagatctgctgttaggaccatttcccaacagtgatgtttccgccagcccagctgggatggctggtttgtgcttttccagaagtctctataatcacgtagattcaaacaataattttaaaaaatgggcaagaatacagaggattgaataagataatgtctcaaagtatttttcagccttatatgccaattctgttaagagagagagagggagagagagagagacagagagagagagaacatgttctagtggataggttagatttccctctagtggtgcataaagaaattgtctttcacaaatctgctacttggagaagaattaattttttatttttattttgctgtcaatattttattttttaatttaaaaattaaaataatctttttaaaattttacattccaagcccagttcccctccctctcctcctcccactctcccaccctcctatgcactacttagagagggtgaagcttcccatggggagtcaaaaaaatctggcacatcacattgaggcaggaccaaggccctcccacctgtatctaagctgagcaaggtatctgtccatgcactagcgataagtcctggtcgcactgccagtggtgccataaaacagtcacccacattcagagggtctagttaggaatccacaagtatgactccagctaagactcgcttagcaatagtggagatggtgcctaaactggcatttccctgtattcaggttgatgactgccttaattgtcatcatagaaccttcatcccataactgatgaaagtagatgcagagatccacagctaagcactgggctgagctcccagagccgagttaaggagagggaggagtgataatatgagcaaaggggtcaagaccatgatggggtagcccacagaaacagctgccctgagctagtgagagctcactgactctgaactgacagctggggaacctgcataggattaatctttaacaaagaaaaatttatgtaggttttattgttttgttactgttttgcctctctctctctctctctctctctctctctctctctctgtgtgtgtgtgtgttgtgtgtgtgtgtgtgtgtgtgtgtgtgtgtgtgtctgcccccatgtgtgttgtgtgtgtcgatacaggtgtaaggtaatggagaccagaacttaggttcttgcatttatactgcaagctcttaacccacaaggccatcatctcggccctgttgtacaggtttttctatatttctgttggcttagttgaattacatcccaaagaaaaccaaagcaaaagcaactcaaaacaaccaccagacccacattcctcctttttctggccttggtattgaaatctggaccctaactcagctgtctctgtgttatttccctggagctgggagtccgatggcatgtgaaaacctccttcaggctgggaatttggctgacatttccaacggtgtcacataccagtgttggttagagttttgatgacatgggtcttttcctcaaccattcttcaaggtcctgagtgtgtgatgaccctgtccacccactctgtcccctgccaagaacttgtgagaaatagacaactgcctatgcatatctctaatgtcaatcccacagacaatgcccctgtcacatctcctttagagcagtataaacagaagagactctttccaaatctcatggcagactctcaagttgacaacctgtacaaaaaaacctagtggtcttaaaaacagagcatggaggagcggaaagttgtaccttgaccttggcttcaggttgggtttatataaggtttagaaaccctaaagggttaagggggcctggttcagtcctatgctggtttccccgatgtcagtctggggtccatgagctcccccttgttcagctcaaaaatatgccattctcacttgatgcacataggtcaacacaaaaacaaaactagccttcaaatgggtataaggaagcatggcatttaagttctttactttctgatgctctcctgattttctaaaattaagatacaattttaactcttaccaggtttatgttgagccccagccttgctgtgtccaaagcacttgtgtattaaccagctattggttaaccccgcactgtttatgtctacaaatcatcaaatcctgctgggtcttgtttactcagcctcagaagaaagcatgaatgaatttctgctggtcatacaagtgcagaggtcacaagtcacaactcctcttgccagatgaatgggtttgacgagctgtgaccagcacaatctggcttttctggcgtcatgtttgttccagccctgctgcacaacacaacacatcagcgccttttcatagaaagctacacaagtctcatggccggtggtgattcgggacttctttgaagtagtgccttttggtgtggctagtaaatcattgcctttgctcataaacaggggtgtatcacagcgcatgaatgccgacagggaacctggtcagtgactgagaactttgacagaaagccctggactcatgtattcagctggcagctggagaaggcactgccaggcttcaccatagccacacaccagcatgggagatggcatccctgtcagagaggagatcagctggcttacctctccttagactcttggatagttttaagttttccatcctagtgccatattgagaaatcctgtgcaagacactcaatagaggagtcccttgtccttgttttttgccccctagtagtgctgggctctaaggggaccttggggtagggatatcttgatggtagaattctaggtcttgggaagaaggaaagcaaaaagggggtagtgaagttctggttttaagtagcttttgggggaaggggctcatttccaagcacatctgttggcagaaactgtcacacgaggcactgtttggtcggctgggacctgtgtgctccatagtttacgaatagaagttagaggagactgtgacagtggtttgaactaatggtcccattattgtcagatatgaaagggacagcaaatcaggagataactgccagggaccaaatgatttatcatacacagtcctgaagatgaggggcacaaatgccccaccagatcacacagggtgtacaagggacagctgggaggcagaagaggcaaggggaaaccttgggctgaagcctctattatttttctgaaataaaagtaggctaggccaggcaagcaagtttaggactgattagtttgaataattccaggagactggaattattccagtccctaactgccttgtatatggcttttcggagatgcaggacaggaaactagtggctaagtatgaacctaatgaagtgtgccactggactgcaggtggtgggcacgccattgtaagctgttggttacctctgagacttggccagctctgggagggcagtttctcccataccagtgaggccctgggatgtcagagtatcagattaaacagatgggctgaatacagagaccaattcttcaggtggctaacatttgggaagatgctccaacaggagtctgtttttttgtttgtttgtttgtttgtttgtcttttacatatagttaatgtcagattgatggtttttgggtcagaggtcaagcttcagaacactaacaaggctcagaattggcagttattacaaattcacttttaacaagtaaaaattgatagggaattacaaaacaagtatgtttttacgtttattaaacttcttgggacctccactgcccatcggatccttgatccatggcagcaggctgcttcttagagttgcaggctcaggccccttctcagacctacctagcagattctgcactgtcacaagctcgagggtgacacacatacactttaaagtcagaggagccttctgtagatgacctttgagatcctttttttctgcctctgcttagcagataaatcttcaaatgccaacccaactgccaagtacttaccagggtaactggcctccgccattccttcctacacctggaaaattaccaagaatgtcaaaaacaacccaaggggaaaaatttctgaggatctgggaagactccttcctgcttttcaggtcacttcacgaaaagggaaacaagatcagtttcatttttgtgtctccatggaaaccttacctcagtgtcaatccacaagtgagcttgttttctttgcctggttatcttagctaagctgagagattcaaaataagccctggatgaagtgaagaaacttctcatttgatatttttccaagacacggaagtcttgctaaatttgttggtagactgtctagcacagctagaattactcggaaaaaggcaattatttaaaacactagggtttgtatgacagctgcatcttaaaggcacagaatgttaaaagaaaagccacgttcctatgactaagtatgctcataaaatgtatagtagccatccttgagccccctctaatggctttgtacggaagactcctttgctatggtgggttcctttctacccttggtttgtggcatgcatgagcaccctgctgaactgcctgcttcatgagacccaagcagccttcattgtagatctttatgcttctgcagctcaaccaatgctgagctatttaatattcaacaaagctattcttgctgttgctctagcaaactgatatgcctgtaaggaacatgttgccaatggctgttaccatcagttcccacttttcaccattgtctggtccaatccaatctgatggggttccctctggctggccatgggatcagcacagggaacaagaagcaggatgggcccctcactggcctagggaagcagcagagttcagagctttcgttcaaacaactgagagttctcacacattcttgatctcttctttaatcttatctttacattggaaaagataaatgaacgtcattttgttgataaagggagatgaaggaagaggtttgctgactcagttctaaaggtcagcctgtcaggttggctgaaatgtgtgttcttggtcctacctactattatggcatatacgtctccttcttcaaggaaaacaaaaatattgttcaccggcatatagcatgtgtgtgctacatacaatgttacgggtttctgcatgccatatcttagtcctatcacatgccaatgtcattggtaatacatgaaccattcatattttacatatgagaaaatgttggctctgaaaatctaaattatctattgtttaacatagtacaactggtatttgaacctacattctgccccaatgcccatggtcttaactataatgctgtcctacatgccacctaaaattatggggatgctgctccacctctggaaaatgctctggagtacccagagcaccctttagtttggcatagaatgactgaaaactaactcatcctccaggagagttcccaggtcttactctcaaacagctcaatcccagactagcagaagactggtcttttctcttccagctgactagccttcttaggaagccatgtcccctggtgacaaacacagcagctgtgtaaagcaggctgcagaagagcagctgtacagagagcctcttaactctcccccagagaagcagtattacccttccaggataacctcaccaagggttggcctgaaagggcatggtgctgctgggcctccagcatcaaagcagtgaaggtccttgtctaggtcttggcagttcctaggatgtgaggagaaaagagctggcattcttgggcttccacccagtgggaactgtccttgctaacatagacccacagcctgggtcctgggtatctctgttcagccaatccttctcacagtaatcttccttctttctttccttctttccttccttccttccttccttccttccttccttccttccttccttccttcctttcttcctttctctctttctcccttccttctttcctctctccctctttctctccctccctccctccctccctcctccatttcttccttcctttttctctcttttgtttacatatatttatttagcaaaataatacgtacctattttctgtcttggttgactttgtcttctaagtatcagtaataaattaaatacatgtgttccagaggaaatgattgacctacccaataatatacaactatcactttgcagtctaatcactctttattttgacctttccctatatttctccacttagtttccaccatttcttccttcctattctatgatctatccatacggaatccctgtctcctaatattactatgcccagatgtttagaaccttaatagtgtgatgttttgattttacaaggaacttttctattactttataacttttgagctatctacccatggaaatggagtgtttgacaggcaagtaaatatatttttctttattacaaaattctcaaacaataaataaaaatattatttctaagagaaggataaaaaactgtctcactgtgtttttcagactgacatgtaccccaggggaggaccatgtgcatggggacagttgtagattgcagatctgtgcccaagttacagtcagttcagagtagtccatgcttagagttttcatcattgggaacagtgctagtaagggggatcttagttccctcctccctcaaaaggtttctgggctccatgtataatcttccagccttccctaatggtctccaagttcagagcaagaatctgtgtcagagaaaaagagaacaattaagttagaatgtcctagatctttgatgtaaaattatctaggtataatccatgctggctcactcactcatactggcattattattctgcctctattccattaatgcttttcatagtaacaaactcaggagcccaccaacacaggccctgagtgtagactggggtttgtttaagacagtagagtgggatgggaatttgggggacactggtctctctccagttatattaatatatgtcgttgaggttgctagattttctagttttaaaagggtcaaagtatttggattttcatacatactgtttttttttttttagttggcagtaatataattacaaaatagaagaaccttgggtgaaaggttgctagatcctggaagcaatagtctgggtgattcaaactatctgaaaatcaacagtgaaaataaactgaaatacatccataaaagcatctttttggagacatccatcatcaccagtcccatgatgaagttacaggaacaaggagatgtaatttgggtacgagccaggacccttcctgtctaggacatttgcctatctacacagggtctaggtgtcagtgggtccagggggacaacctgcttcattacaaccagatcagctatgaaaaggattagccaaagaggcctcagtgaggcagacctatggtagcttcaagtggctgagggaaaagtaagtagagttcccaccaaagacaagaaatcctcctggcaacccttgttctaggttgtaacacacaaagaaccatgataaaggtagtgatcaaagagtcaagttcaaggactactggatcccccacaaatctaacagaaagaaatgaaggaagctgacagagtctgaagtcccctggggtgtttattgcctctttttcaaacaagatgggcagagaccagtgaaggtttgcaggtcactaaagagacaaagtatatctacctgaatcaacagaccttcttatggtaggaaattaccaatacgaagtcaggtagaaatataagggtatataatagggaaaagccttacttacagagcgaaccagccagccggtggtagtctgtacagcaagaagcaaagagagagaaactgaaaccgaaacgcagtccccctactcactctgaccacgccctcaccagcctgctcaggtactcctgtagccagcccctaagaaggcatggctacagcttcccctacaattccccttttagtctaaaagaggattaaaacttaacagtataaaggtaaaatataagaagatacaacaatctgcttatgtcatctcctaactatctattttaactaaaccctaaagtcatctgaaagaggtgtctaagcctgaacacctccttccaaaccaaacaataaacaataggaagctattcctaacttctgacaccagatatggtaggaaattaccaatacggagtcaggtagaaatataagggtatttaatagggaaaagccttacttacagagcgaaccagccagccggtggtagtctgtacagcaagaagcaaagagagagaaaccgaaaccgaaacgcagtccccctactcactctgaccacgccctcaccagcctgctcaggtactcctgtagccagcccctaagaaggcgtggctacagcttcccctacaccttctatacagtcaagagacccatgagtgtgggagctcatctcaccagctcatctgactagaccataaagcaattgttttcactgtactcatggtattcaaacaccgggcacaaagtcaccagcaaataaccagaaattattgttttttaaatcaagatatcaagggctggagagatggctttgcagttaaaagtacatgctgcttttgcagaggacccaggttcagttcccagaaaacacaaaatggctcctaagtgtctgttactccagttccaaggtatctaacaccctctttggggctccttgggcacaaggaacacacagacaaacacccatacacataaataaaaataaaaaaatctttagaataaaaagcaagatgttaaaatcaaagaactaaaaatgaaagttgaagttagaacgttatcatttcatccacggcacaagagattgctggcgagcttgagctatgtctgaagaaactagatggaacacagctggagagcaaaggggtgaaatggaagagagggtgtgagacgtgaaagcgatgtgagcatttccaacataattaattagcctcaaaaggagagaagcagacactgggacacaggcaaaacctggaaaggtatcagtgcaatggaactagttggcaaaacagaagatataattaacaatgaattcatatctagacacaccagatgaaatcccagaaaatgaaagtcaaaaaggtaatcgctttactgacaactaatttttagcagcaaccctgaagatcaaagggctgaaatcaaaccacttagaggctagagttcccaacatagtgaaacccttgttggaaaatggaagcaaaatggcagagcttttccaacaactgattcagcagagtagtacaccagcaggccacacatgaagaagtcccccaagatagtggtgggggtagagggacattatcccagatggattttggaatagagtacaacaaggaataaaaacaaagagtgtggtgtcttgcatggtttgttcctggaaatctggctgaagataggatggacacagagacagagaagctggaattgggtgcactgtgctcactgtgacagtgggtcccagctgcagtagcagccagaacctcagcgtgtttattttatacgtctcaatcaagaaggcagacttactgtattcagatgagtaagggagtaggtttatggtacccagtggaacaagggtttagctattctgggtaggatgtctctgcagggagcagtctcaggctgcagtcctccctgaagaagaagctgtgattgacagtttttgcatacagcatcaccattcacacttggaccagaaaagggctctgccatctctctgcatctcacctggaaaggctctgtcatttccacgggtctgaggcactggggtccttgacatggctatgtccttgtaagacaatcaacatccactcatgattccctacattccccacaaaagagatttttaaaaaggcgaaatagaaaagccatgtcaaacaataaaaaaatcagaatttgaggaatttaaaactacaaagtgtgtgtacacgcatacaaccaataacaaaaacagcattagtcatttcagataaggtagactttaaggtcaaagtcgttgttaaagataaagagggattcatcaaaatgaaagccaggtttaatttctcccaggaaatataaatgaaaattcctaagccaaaagactggagaaagtataagaaaaaaaaaaaaaagactgaagaaatccttactaatcctaggataatcttaccccatcttcagtaatcattagaccaagcaaacattctattagtgctaatgtagattagtttacacacccaacttaatggacatatatagatacttcaccaagtgacataaacataaaattcttttcatgacacagagacatgtgtaaaaattaactatgggtagggagtgaaagggttctgtcaccagcacaaaggcaaaaaaaaaataagcacataatacatttgataaaacatggcactcgggctagagagatggctcagaggttaagagtactgactgctcttccagaggacccaagttcaatccccagcaaccacatggtggctcacaaccatctgtaatgagatctggtgccctcttctggtgtacatgcatgcagataactgtatacataataaataaaaatctttaaaaaaaaacaaacgtggcactcatgtgtggtcaacattcttctgaaaggaaccagagaaacctttggtttcacagaagggcactgctggaacccctgggatgcaggcaatatgtgtggctagctgtacttactgtgtggagggctaggtgacaggcttacgtacaactccagctcttctcacagcacaaacatccattttacatgaaactcaagtagattaaattcaattaacttctctgtggttataacagtttacagttcttttatgtgtatgggtgttttgcctgcatgtatgtctgtgcaccatatgtgtgtagtgctctcaggggccataaggggccattggattcccctggaactggagttacagctgttcacatttttttaaaggacagatttcaaatgccatacttgaaacagaatccttttacagtacaggtgttcagacaattctaaaaataataacagcaacagcaaaaaactaaaccaaaccaaaaaaaaaaaggaaaccaaacaataacaacaacaacaaaccaacacacacacacacacacacacacacacacacacacacacacacacacacacacacactttcaggaaagggaaacttcccattggatgaagggtcatctctgctaatagtagcccaacttggaggctcagctcagagcactagcaagccgggtgactttcagcatgttaacacaatacctccggccctcagattcctcatctagagaggtgttataccatcccctcagaagctattaagatcagtgtggttcatggattgagaagagtgaggagtcataataggtactcggtgtccattactaaaaactgttgaagaagaaaacaaagccagtatttcagtcccctgccttactggaagctgttgtattgcccgtgagctaagaaagtctatgcgagagtgagaaggtactttgtgtgtggtgtccctactcagaatttacatatgtccttgggtgaggcctcctggtcacctattgacacccctgactacagggtagggtgcagctgtgtatacatctgcctgcctggtaaccactatgccagcctgttttttattgctgttgtaagctgtggaacatgttgaccaagaggacccctgcctgccatgtgaccagttgagaaaaagatcccttcatccatgctcattagcattaatttgcaagaacagctctgaaatgtggcttggtgtcagttcaaaagcagataggggatggctttcagatgtggattttaactgctggtccatagagaaaagaaacagtcaaacattctgtatctgagaggcacttgatgcttgcaaaagtatcatgacttaaacctgcccgggagcatttgataataatattactaatgcatgaatatctatgattaattgaatgtttactatgtgacaggcactttgctaaatactgtcatacatcattctgttccgtgcttacgactctgtgtggcagaaactattattagattccaatttgaaaagtaaggcacgagagattaaatgccttgtctagtttgtgctagagatggaaatgaagccagccaccacaccatacaggcagtcaaccacttaaggtagggtctcctgtaccagtcagcccttaactctttccttacctaatgaagcactgtgaccttacctgccatcgtcagctggtattacttgacaaacttcctcacaacttagcagcactgcaatgacccattctgtgtgtccacggatccaggtatctgaacatggctccaggatagcttgtcctacccatttctatgatgtcagtgtctggtgggaaaactgatggtgagtgactgatggtgatgctgaggcggaatctttgtattcatgctttaggcatgtgtcagatttcttgacacgactgccgagggcttggtggggtgtttcagggcgtcctggaacccagtctgagaagtcacataacatcatttctgaactctatgtctggaatgcaaaagcttgttaaatgtcaaggctgggcaaagaaaccttgcctctttagtttttgttttatgtgtaccattttttttttctgtatatacagatgtgcagcacttgaatgcttggtgcctgtggaggtcagaagacaccattaaatccctggcactggagttatggatggatgtaaaccaccatatgggcgctgggagccaaactcatgtcctctgcaagagcagcaaggacccttaactgctaagccatctctccagctctaaacccaccatttggtgtgagaagtgccaatgattttgtagctgtgtaaactactctgtctgtaccctttatgtagtgtattagtcaactttgcatcattatgatgaaatttcccggataattttcttataaggagacatgctttattttggctcacagttttagaggggcccaccatctcccaacatcaccacccaaggataggcttttaatacacaattcctcggggcaaacccaaaccatatctaaaccattgcctgggttgtgtggccctaaattccagccagggagctttcaaggacgtgtttactatgcagctgcattcaggaatagcacagtgtgtgtacatgccaaactactgacacacccaccatatcactgcaaaggccaactcgagccatggtgaattcagggcatggttctcttggcagtccctggggtcagagatccagaaggcaggctgataactcaccagagcaaaaaagggcattaagacctgaccaaacaaagtagctgctttgaaccagggtgcataccagaggcattcatttgacatttgagagagtatgagttgattttctaataaaagatcacagagtatactaagcagccatatgacagccagcttgcatgctacagtcccattcctagtttttaacaataacaatcacttatgtatctgccctacatgcttgggactgtcctgtttcctacttaccagcttgcttagcctctcacctctgtgaggagggtgctattagcccatgaaatgaaaattgatgtccaatggggttaaatgacttatccagatcacacagctcataaagggtagagccagttgatccaggaggttgatcaaggctgcagagtcatttcaccactgacctgttctgcccatcctaggataaagagcacagtgctgcaaagcagggtcccagacctgggcacataccagggtcattttggaagtttgtcagaactacatattacaggcttagtaggaacacaaatactctgtctctgactagaacccacagcagtattgtttgatggttcttggctgttccttaggtagcaggctgctagcagacctgtggggggctcaacttcatttctaaggaacatctataagcagagcaccaaactgaagcatgccaatgttgcaaccacatgaactcaggttgcaataaatgacagagtaacctttatctcagcttctgcagccttgaggaggagaaagagaaggcttggagtaacaaactctatagatgacagtcttttgtttaaagttctggttttagtcctttagatcgatttctgctaagaattttagtgtgaggtaggagattgttttccattaaactagcaagtatattctgcacaaaggaaaattttgaagggtgttgtggacatgttcagtgaatagaaacatgaagatgtagtggagctctttgggagggaatacagggatctaaaccagctggtaattccccatccctttgcaatgctatagcttcgtggacgatgaggagggtacaggcagagaagagaggaaagggacgttgtgagcaagggactacttctataggcttaagatgggaaattttgcaggctagtttgtatctacacagcaggatcccagggtcagaaacccagtgtatgccagccacgagtggaacccacagagctggccagcctactcacttactctccaccccctgttctccaagtggaaccaaatggagcccacgtttgaataaataggacagttgtcttcatgattatcatgactgttaggttgtaatataaatgccacggcttacctaacggcccaaatcaatggcaaaagtgggtaggatgatagagaaggaagctgatcccacctgcatgtgtggcttttgtgggtggcacattgaactcccagagactggcttggtcttgcttcggtgaatctctttgggaggacttcctctacttcaatctggagagggatttttccctcagaagaatttttatggaggcctgttttgttatttggagaagataaattttctccgagttgagctctgaattctgatttatctgtaggccttttccttgtctatgttgattgattttaggtacattaaaataaagatagattctatggcatggagtgggaggaggtgctaaggattgacagcacaccaggaacccagcagccattctgagaatggctgatgacagagcttgagaagctacctgagacttgtacatcagatgatcacttgcagaaagaaagaagcttggtgtgacaaggttgggagcagccgactgtctcctatgagccatggatgctaacaaacctgggaggaggaaactatgggtgaggagctactgtgcaaataaggacagagggtttgatgactgccagtgggctggaaaggaagaaaaaggttcaaaaataagtgttctagccacaccagtggagagcatggactaggtgtaacacactgaaccccaaatccaaaggcctaaagtgctcccaattttgacactgtttgatgtgttagaagtggaaaattctagaccttgacaaatttgccatagtcaaaatgaagttgtattaagaatattgtataaatttacctggagttatgtgtaaaaaaaagcatatatgagaaacaaaaatgaattttgtctttagacttggcttccaccccaagctttttcattatttatgcatatattcccaaataactagaaaagaaaaaaatcagaaccatgattccaagaacttagagcaagggctgcccagttactatatgaaggataagggggcacacaccctgctctgacttctgtgagctggccctaattgccaagggtgacctcatgcctgatgtgaccagaccaagagacatgtttgattctttgaaacaaagacttggagaagttaccagatgcatacatagcttgatcactgtgtctttccaaccacacaggtagatctattgctcatttcccaatcatttcattttaggtcaggacatttttctttgaatataattacactctttaggattgtggttctgtttcatcctgtataatgtccaacttttattcttacttacttagtgccataggaacctaagtgtgattgtgaaacaagttgaagaattcttttacagtttttgatttctcaccaatattttacaaaatctcatgcatatccaattcaacagaaaaaccaatcatcattctctattgtctctaaaatactaaattttgttttttagaaaaaaccctctatgtatgtactaacatcttactgtttatttgggtaattgtattatctgaatgaagtgaaattattttgtggctcattattgaggttgcacaatttaatgatatgaaatagtccccaaagaaatactttagcaaacatgtccttagattaatacttccactgctctgattatgacagcctttggttccaaggagggtagcatcttccattgcatagtaaattaaataggttcaccctaccctagcatttgggtccccccacatcagactggctttcatatcgtctaagattctctctatactcaagacatactagaagacttgagctatctgtgccctatgcatgttcttctgactgcaattcttgagcagccttcaggcttttatctgctaggaacaggttaacttgccagaacagaatgctgcctccctctacaaggcttcctttccagaattatgggctctttattcctttacttcactgttgtccagtacttctctatcagtacctttgttttggattctgtctttaagtagactgattttatacttattttatacttatatataagtttactcagtactccacattgaaaggcaatattgcttgataaatatgagtggtgcatacacagaaatttagtaaaatatacacaagaatgtcttcaggtgaaataattcttggccaagaattgtttactctagagtgctgaaggtcagcagtaaacagggtttcttgtttgtggcagtatctggattgaagagtgctgacagatcagcttcctcagtgttttatcatttatgtcttatgagtgtgttaggagtatgtgctccactcctcagaaacaggacaagcaattaaagggaagatgtgatccttagtcctttgctgaactgggttctaaagctctctaagccagctccacctcctgggaatactgaagaagctaggtagcctgtatggtatagggtaggaagacaggtcctgtagcattagtgtggccatcttccctgaagtgccagaatgatggtttctttggacctgtgttttcaggatgaggagcaagctttgtcctcacactgaatgtggggaggtgtttggttgaggctataacttggaagggattagtggatcagaagaagaatggaagtttccagccttcctgaattcacagtcttgtttagcagtaggtttatgcttgtccctatcacgaataacttctctgtggttgagtgaaaacctcacagagcagttttgtgtcccacgtctgtgtcctgtccattccagtcactgcctggaggctgtaaaaggcaatctgagtccatgcctctgaggtagaaatccatccccaagcccatactggagttgatttcaagttgatggtcgtcctttcttttccaggcggtgctgagccctctcatagccattgcgctgaaaatatcccagattcatgagagaactggccggaggggacccactgtcatcacctgagcacagggcagaggagcacgcagagagacacttcaccaccgtgccttcttgcttcccatttgtgcctcttaggactttggaaaaacaaaagctattttactgttggaagggggtgggggtaaaatgaaatgaagatgggaaggggataagcaccccttttgttttgatttgttcagttccttcatatgcagcaaggtctttagttgtctgtcagagcttcactgttgtttgatatctgtatttcatcacaccaatgatcttcccctatggagatagacaggcgcgctaagaaactattaatcacagccccctgtgggtttctggccagagagagaaagggagcgagggaggaagggaggaagggaggaagggagagagagagagagagagagagagagagagagagagagagagagagagagagagtgactggtaagttctaaggctttgggcaggctgaagatctcattagcatggaggagactccactttgctctcctaatcagatcaacaaggtgaaagttttagaactttcaggatgcacccctctcccaccagccatccaatggtccattttccccagcctgccactatctctgcgctgcctctctcacgtcttctagagttttctgtaaatcacaatggcacacctccaacaagacagataaaagggtgttttcctctcttatttgcatatagtattgatttagctaccaagctgattgcatccttctgaatgtagccattttctgtgcaggtggggaaggattttctggaaaagactgaaaattaatgttgaaaatgagggtgacactttcttgatgtcgcaagagccaatgcatgtgtttgagtaactcctcccaggaagaatcccactgtgtatccggattctgttcacagtggctggataaaggagaaggggctgaaataattagtgggccttatgagacagagaggtggattgtcacaacagggacctggcagctccagcaggcacgtggactccggcagcgtcctcaggcaggcacgggatgtgtttgcttatgtttggcttccttgggaactgcaggttcacttatcatgtcattcgtggagatgacctagtgccctttggctgttgagcaaggcgtgactgactactgccatcaaggtcagtgctgcaaggaaacattcccagaaaggtgtttgtttccattttctctctgtgcttctgtcagaaacttgctaggacatttagtagccaataaaacaaaacttccttattttaacctccatacaagattgtggccttctgctcatttctgcctcttgccacttacagttccagtttggtcacctgtacagaacactggggaggactgcaatttgttctaatgacttagggggttggatgttaaaaataggacagaagaaaaatgaattgctcaaaattggttttgggaatcagcaaaagttaaaatgggatctagtctttcaccataagagtctttatttcaggataataggaaggtggctttgagctgagtttatatttttaaaaaattataaaaaacatatcatgaatggaacatttttgccttgtagctttcgttcttactatctctggagtaaaggtccctgataacatccgtctatccatttgctgttgacctgctatcagcgccttctaacacgtcctttgacatatcagctcaagctgggcaagcaaatatttttgcctcaagttcctgaacttaaatcatctctaacttttaagttcaagttattctacttcaacattctgttcccccccccctttttttttttttttttttttagacagggtttctctgtggctttggaggctgtcctggaactaactcttgtagaccaggctggtctcgaactcacagagatctgcctgcctctgcctcctgagtgctgtgattaaaggcgtgcgccaccaccaccccgcctgtttcccttttttatgcatgtgttgtagcccaatttatagtcacccatcaattaattcactcatttattcattcatccattcagcaaagactggttgagcagctactccaggcacattcctcttttaaatttaacaggaaggtggatggagttgtacctgctcttctgaacttagaatttggaaggagttggtggtgacaaacacaagtaactgggaggcataaataatacaatagaagtgccagcatgagctatgggaacaagagtcattggctccaaaatggtgggacactggcagcaggaggttcttcttaaagaatacggtgtcttgggatccattggtgcttgtgtagtttaccagaggtgaatggaagcagtgagacagaatagtcagttagctgggatttacacgaagctgacctcgggagccagaggtggtgtgatgggtcgcattcagacagacataggatataacaccaagtggaactgatcttcgtagcatctttttctctcagctgggttaacaaagagcaggtctctcagcaattctaggaccaggcctgtcactgagttctctcaagtttacactgctcattatttacactgtattacttctgccttaacccaagattgcatggatgaatgcttgtattactctgaagaggcatgaaagccagcaagccacacttacctatatgatgttcctcttattgttaaaaatgcagggtcaacaaccagcctttaagagcaaatgacctggggtcagtgaggtggttggcaggtaggtaatggtgcttactgaacaagcctactgaatgacttgagctcaatccccagtatccatagaaaggaagggagagagacttgactccacacagttgtcctctgaccttcttatgtgtccaggcatgtgtacccctccctccacacagataattttttttttaattaagagtaagtgacatgagacacacaagaattttgtgggaaccagtatagtgaatcgcagaagaagcaactttacagtgaggtaactattaggtccagtctggtgatcttctagcactcagggttccctcactgcaacatatgcccctggaaaaggggagagccatcacatatacgtagtgcttcttaaatgaagcagtgtcccatttatcgaggggatttgaaaacatgtgagcatatgtgccagtgagacatttatagggggaacctgggtgttatatatccgacctgccaggtatcagccatttccccaaaacaaaacattgctttgttttacccaggattcttgaacttcctcattgcccttttaaaaaaaatgagagggaaataggaagatagcttaggccatcttcctatttgagacaataggtagtaaattgtctcaaaaacaaaggtggagagcacctgacattgacctctggcctccacatgtatgtgcacacacatgcatgtacatacacagagagaagggtagccctgtttaaagagagaacatttatcagatctcactgttccaaattgcagaatgcagccatcagatctgcaagccatgaatgctttcacataagtcttagattgacaaccatccctgtactagatttgaccacactaaatcatggcaagaatgatagtatgacttgagtttttggtagccagatccatgagctatggttgatgtagaggatgagaaagcttttgtgggtcctggtaatgacagtaagatgactctatgcccatggtaataaatcagtgtttgggtcatcaacagttccagacagcacgagattatctgaggcagcagagcttagcagaaagcctgctcaacttcaaccagctggaggctttcccagcagaaatagcccttgcaattgacagctcactattgtgtgagtcagcggggttgtcatggaactttagagaacaaagtggaataacaaatccaggattctctcctctttccatttctatcagcacctagcacgtgccgtgccatggagatgagcttgaatgatgtttcaaagaaaaataatatactgaggcaaaatcttgaaagacaagcagatggtgtcagtaaaaaaaaacacctgtgagtttttgcatggaggggtcaagacagagccagtacatctccgatatgcaaaggcccagcatcgtgtactgtatactgaccttgtcatagtgatcttctaggtgctggcagtaattatttaaacttgttgatcaaaggaacaacatgaagctataaactaaggtgcctggggccactataattcacactggggatgaggacggatgagtaaggatcctctgccatggagactttcctctctccattgtctcatagtccaaatgccctcctcagtagccataggaccacggctcctaacccagcatcatttcagttgatcacacacctgagatagaaggaagatgccagtgctactttcccagagtgcaccctgtaggggataatagtgtatcattcactacagagggacacatttgttgacttacccagtggtttttagttgctaatacacaaagatgaaagattgctttgcatgatatccaggttctagactcctgaatcagagtacatgtgtcttagaaacatgtcaagaagtatgttttagtgttgatttactttctatttttttctttttgctttccttccttctcttcttctccttctccttccttccctccctccctctctccctttctcccttcctccattcctccctcctttcctttcttccaaggctgactttgaactcctgattctccagtttctatctcacaagtgcttgggttacaagtatgtgccaccgtgcccaactttagtattcttttttaaaaggaggcaccaggttgctttctgaagcaacagctggtgtcagtcatgtttgggtttgcaggaatataaactcatcttgatactgtggagaatgctaccatgacttaggatcctctactgctttttttttctgatacaaaaaagtgacaaaaaaggaaagaaggaaggaaggaaagtctgtggtaaaaaagaggtgactaaggttagcatgctttctgtgaaagaatgaggaactagcttcaatcctcactcatgccaggaacccagaaagattcctggaaattcaattgccagccaacccctggcacaacctgaaacaacaacccccaactacccgatgtatgtgtacacacatgcacttgtaaaacgcagacacgtacagcacacacacacacaaaataaattccaaaaagactctgaatgcaaaatttattgtcttaaggagactaacacaatatatgcaaacaaaattgaatggttggttcatctgagtggtaggaaaaccatctattctgtgtgcaaatctaggtagaagtccaataatgctggtcattcagaccagtgaggaaaattgcctgggagggggatgatggaaagagatgacaagaaaggactgatgaattgcattgttaataaatagccaccttcctgctaaacagccatcagtggccatcctctctagtcatttgctcattgtcaaggactcaaagcagagattcataaaggtgtgcttcatggactagggttttgttcatttggcatcttttgtgtctatcaggacactcacagtctgtgcacagtctccacaccaatggagaagtagagacaatggataatcagtcccaccttgatgactctcttcctgaaagatgttatccttcccttgagtcaaaggctcttctggctttcctctgtaggatacaggaaaactgcactatcagggccatttcccagacaggaaacaggctggcccagtaatccaaaagtcacctcagctgcttcttcaagggtgtacaatatagtagtgactgggaacattgctttctgttgggggtcatttttgacatggagtgagaaatctaagctgtgtcctagaaagaggaaatacataaccagcctaactcaaaagtgtgaggtaagtaactctcctcacgtacctttaggttcttcaccttccgtgaggccattgtttcactgaacacatttcccaaattattgaagcctcagttgacatgtccataaaacaagaatggtcacagcacccacctctcaaagatgggatgggggcctaataacatgcatgggagggctggttcacccaccacgtgtgaggcatgccataacttagatatcaacctgaacactgatgcttcacttggtagagaaagaacttgaggccaggatatgcataccctcatccacattcaaaagtctcagcctatgtatcccaccaccatccttctccctaacctgttctctgattttaaaactcccacaaagaataaaaaaccaaggagggaccattggggttttaaagtccaggagtttagttctctgtactgagatacacacacacacacacacacacacacacacacacacacacacacacacacacatatcctggtgatggaaacatgaccttacagtttttaatctcttatgttctgaatttgaagggggagcatcttgggaaactgcatatatttttaaacttcacaagatttgtaagaagttgtgtgttagcatcacccttgtttacctggatcatgaatttagtattgtgtctactcaactttaatctggaaaaaactcctatgtgcctttctgagaacctttttaagaggtcactcaacattttgtgtttgaaccatttaaaggcaaatattgcagtctcttccctttctcacagaaaacaaacacatacataattaaaataaaacgatacaaaatatcgttccttggttcctagtgccccctcccatgatgtgtccgagctatggcatcactcaggtagcatggtcagtggggtgactctaaggctgcttctcaaacagtcttccctttgagattctttggacacagtatgtgaagggctgtggcagtccccaccaacagcaagtgcacctccaggcttgacttgaggtcatggggttaggagggaggtggaaggcctgtccatatgccttctcttccgcctaaggtttgcctgggttgggttttgtgagaattctctacaacaacttcctgctgatggctgtgtccttcaaggaccccaagctgccctggaaaccctagtctcttgaaccaatgatggccttgctccagtgcagggtgacacagcagcttcacagtccctggcccgcctgtctcctcagcagctggggagtcctgagtgctggagagcaggccctgccttcagcactgtgcttggccccacagcatcctgtgccttcactgtaaccaccgtgcctgcggtgctctcctggtaggacggtggggcctctggttgtggctcattttcatcttcaagttcaaggcttgtcgctgtgtatggaggaggaggaaattccaggaaccccccgcctgcagggcaggtctgtttctcagcatccaggctttcttcataagccggggggtaaaagttgggcctgtgagacgaaatgccacaaatatgcacacgttatttacgtcttggtggtgaagaagcatatgtctgcctctctcatctcacattgtgtgaagctaaactgctaagaaacactgagtttcaaacagatgtacttttctgacatcaccagtttctaaaaactgcacacccttcctgtagaatccagtcatggcagcccgcctgttccagacaggtattccaagctattccttgtttgctctttcagcccaagaaacattcagtgcactctccttgtcagccctaggtgacacagactttgaccatgaacctctctttagccagtacacaatccttgttaccactcacacacaccatcttccactccattgctcccgaggcctcagaccttcacaagcaacaaaataatggaaaactattacatgcaggtccctgacctgggggacaccactactctctcctgacacattgtcaagtcctgggcagctggtttcagagaaaacataggaaacacgcttaggtctcaaaaggcattggctggtagctttgtgaggcattcaactgcagcgtagttgctgacctgcccctggttaaggtcagtcagcccagctgatggacttgttcatcatcttaaccatctaagtaattactaaatgcctctggctcctccaccatgaatgaaggtgggggtggggtgagtggaagagagccagagtgagtttgcatgagttgagtatttatagaggcaatctatccagggccaaagggagtgtttatggtgagtaaccacaacagaacagggtctgccatttgtagccactgctccactccaaatgtcacaaggcctggggccaaatagctgaaggagctgtctactgtacgatgtaaggcttgacctttcccagggatagctaaggccgagtcatggggatagaaaggtgagctcttccatggaaccatttgacagactccaagaagactactgccatgaacaccatccccagaggaacattcgcttggatatctctgctctgttactcatgttgagtgcaaagcttttgagatgcagaattttcccagtttggctctgtaggatgaccatctcaggatgcagcaggaaggggcagtgagagagagagaggtgtcaagatagtcattatttgcttttgaatactccagacaagggaatatatatgaatgtgtcggtaaattttagatgccttctaaaggcacttgttactcttacaggagttcacactgtagaggtagatacacacacatgaacacaaacacacaaaacatacacacacacacacacagacacacacacacaccccccacacacatacaattgctctagaagcaccttctaaatcactcctgctatcttaatttttggtcaaacccaaagaactgcttcctggttagtctaatcaaccttggaaatggtctgtggttgttgtcacttgtatgattgatgtcagcaatgcatagtcacaggtgagagtactctgattcaatgtgcatgggatagctaagacattttatggattacctgctcttgcatgaatatcccagaaggacttatggattcttacatcctataccttaagaacaatattcttgtgttaggaatcagaagattgaagctaaattaactgactacaaggttacccgaatccttggctttttgttttggtaatatattattataatataaacttatattacttataagggcattagtggtatttagtgatcctatattgctgcaaaccatctcttgaacttttatatcactccaagctccaatcccatattcattaaataataactcttcatccccacccccatcacacacaccatgctcgaggcctgggaaccactgttctgtttcttgtctgtggaagctacttggtgtaagtagaatggtaccctttctgactggtgggtatcacttgacataatgttttcagtgtgtagccacctatagcatgtatcaattattttgttctctcttaaggccaaataatattgcaatgtgtatgtgtacatactgccatttgttttctccatcattgatgggcatgttatctttttgccttgaatgtatgcttcttacaaggtgagatcagaacacctaaaaggacagttatctagaacttcccttagtcacagaagttgctgactgactcagggtccgcttgctcatttaatgtgggcagaatttagtctgggtctttctttacaactcattaaccatgtcatagaaaccacctagccatcgcctatcatttactaaaatcatccccaatacagaagaagaacctaggagttgtgccccttaatttgctgtatgtgagtttttgctagggatataaggatcttagcctaagaaagttccctcttgcctcattgtttcccccaataacagccttgctcttccacactatgaccccagagcaaattgcccagtgaacttcgggcctagatgcaaagtctcatgtaagtggatctgctgtggaattttacatctctccacttcccacactgtggctcatctcagcccttctcatgtcctctggcactcagcacatacctgtctattgtggtcaggagcaggtcctgagaagcaaggtgctgtctgagcacatggttgaacatctctttgttttcatttgcttgtcggtaagtggcccagaaaattccactcagaaggatcacaaaccccataggcagaagcacgtaggctatgaccaggttcctctgagagtgaaaaatggagttggagatgaagaagccccccaagcagatcatcaggaagccagtgaggagggagagggcacagaaaattagaccagtcctgttctgcatccctgcttgtctggagcccgtctgaccctgccactcctctgtttccaggcccgctcagggaaatgcactcattagccaggttgcagccttatacacacgaacaaatggcctttgaacaattaagtgaagcaggcccggggaagctattcattaaccactgaaagttactgtaatatcctccagggggaacctagaaacataacattgtgtcctccaggaagggaaggttgcatgtagccagtgtgttcccggtgagtgggtaggacctcagctgctcccatgtgctagatgagaggccctaaacctttttttttttttttttttttttttttttttttttttttttttttgataatgaaggtactggtctctcacctctcactgtaggggattctccactaaaagctacagaactttacagctttccataaagttttgcttttgttgtttggcaagaaatcctttcctgatttcattttctctttctatactaagaagacatttctctgagactcttggtgtctttgtcttgtctgcctaagtgactctcaccttcattgccccaataatctggtactggtaactccccttccccacccctgagcaagccagagagtgaccgttctgctgataggagagaattctgggagaaggcacatagtggagaagggactatatgggggcacttggcaatgtctgtaaaagaggatggtgtaataactgctgtttgaattcggctttggaatccttcccattgtcagggtgctgatgttgccatctcatcatcacctctggctaatgggtacttactgggtatttattctatattactttagctcaggctaccattcctgcttcattataaatgtttcacccaagtctcttcctaccctccacaaagatccacaggcattggacctaagagcattccccacaaggttgcagcctgttgtagctaccacatataccagtcagaaatgcctcctattacatgcccactctctgtctcccacacagcttcacacccacctctagcagattataggctcagaaaggtctgaaaccttcgctctaagatatgtcaactaaaatttatcttagtagatgctgccaaacaatgttcctcactctctctttgctctgtgtaacattgtcttagaaatatttccaagctactatatgcactctgcctgaggtctgtttccttcatcttgacagacgatggttgcaaacgtcttattccagatctgcttctagcctcacttcctacctttcctattggatacattggcacatccatgccaaaaaacttcttcacgcaagggcttctgagtcatttttgctttagtgctttcattgtcatcgcttgtcatttgcttttccaatgggaaagtgtttatttgtgcagtgtcattatatttctgctcatatcccctggccttgtatccaccatttccttagccccgcctttgtgttagggctaggagagacaggaagacactgcagttcaaacacaatagcaggcacgtcctccttctacccactgaccccctacatatattacctttaattctaaactacttccgtcttctatgcttggaactacctttgcagtctagcctttgtcttcctccttctgcaatcgcttttcaggttcctctgatgctcactgaggactcttatctcctatgtaagccattctctccatctgagtgtgagctggacctagtgatttgattctagagagaagaataaggcagagatgataactgtttccgtgatcaggttaaaaagaagggaattgtccatcctgctaatagattattaccttcgaaggatgaggttgccatattagcaagactcacctggcaaagaaaaagagcaccttcttagtcaacagccattgacagacccttcactaagggcccttatttcatcaaccatgtagaagtgcactctgtccacaagcatacagtgaggagcaattcctttcacaactgattctggagaaggctctcaggcagcactctgactaagtgaccctggaggacaggagccattgaagttatacctcccatacccgaatcacacgagctatgggattataaatatgcattgctttaagttactacatttttgtgacttttttaaggtagcaagagagaactaaaccagttccattaggacctgagaagccagagtagtagttagtgctaagtgtttaatcagaggacctggtccacatcaccctgttacagtcagctctattcttcgtcaccaccatgatcatcatcactgtcagtccccaaagccacaggaaaacccagggtttccaactgaattgatgtcactaaaggttgggtcccaagttcccattgactgtggggtcctggggctaatagtaagtgtcagatcaggaaggggtagtactcagaatgagtgccatccaccatggaattgtgtggtttgtttgggttacataaatgtgggagctcaactggggaggatgacagagcaggctcagctcctatggcaacaggaacacatgaacaaatgagccctttcctacctgccctcctccagtgccaacaaaagacatggttttccaaacacatttcttcctctcgggcatcccagaggtggctcctgccattcctgagtagtgtctggttgtattagtggtggtagaagcagtggtggtgccttcctaagaatttcagtgaaatacagcaaattccagaaagcaccaggggagggaaggaacagttccttcacagaaaatgtatataaaagaaaaagtaagtttctgagtccaggccattttaggaatttgagaagagatgtggcatcaaagccccctttcctgtcccttgttaaactgttagaatatgttcctaaagctagtcaccaaggtctagtcctttattggccacttccttatgcctgactaaaactccaaggtccagctacccaaacactaaagtccagcaatcaaaatttattatttggctacactggctaacatgtccaatcagggtttaccaacttaccctagcatagacttcctttttttctccttaaaaacccactcctgtagaaacacctgctgctgtctttgcctggcccagaggcagccccctggcccagacgcagtcccccaccccagggtaataaaatctcctttgtactgagaatttggtgtctgagtgtgttcagtaccactccatggtatgggtaaagggaaggttgttattgtagatatgagagacagaacagtcagaggcatctggaagagtccagagcaaagaaagacttagcctgaacatggccagcagactgactgggcctgggcatgagagaagcaggatgggatggctggggatagaagaggagacatacagagaatacatatctaaactagcagggttataaggagaatgggggcagtttagggtaggggaggaggggataagggcaggatgcgagcttggactctgaaatgtatggcaggtacttgtcatactgagggaacctggaggccagcgggtactttggcatactaacaggcatcacaggtagccattggtccctttcgtcagaggtaagggaagggaatcattttggtggagaggaccaggcttcataagatctccaggaatgctggcttctctctaaccaccagaaatcttcctacagtccaggttgaactcatctctggatatctgaactgccttttgaagtgtgtggaattggtatttcatttagacctaacaacagtaatgtgttatttggccatcagccaaacatcttaagacataaatgactttgaacactgttcccttgggcatgacagacccatgagcactgttctgaacattgtgtgcagctgagttccaggcactgtcctgcctctaggttcacgttagaataccctggaaattggctttttcccctcacactctgcagcacacacagtcagggccctaggacatgacacagtcctctacacccatgtttctgtctctaggtcaatgtcttgaaaacaggccggtggtaacagagaagcagggcggctgtggcacagaaagggcctgatgccaagcacagaggtagatttcagaaggtcacctgggctcaggaagtgagcctctgcaggaggtagaggaggcagcacatacgtaagaagccatgtcaccccgtctgacctcatgggggtgattactaagtggtttctggattagcctttcacacttgagggttcactgagcactggtaacttcctcattctccttgttttctttgcttttaaagcttttcctctgtgacccccacaacacacacacacacactcaggagaagactaagatgaagggagtttttgaaattggcaaaagacaaacagcaagtcaagaaattcctagcatggaaaggaggcagccactcacttgcccactgtggccagcagggcatcaagacagagaccccaagcgggtccggaactgagatgtgtgcccacagcactgaatttgtggggttgcaagtcaagccctttgctaattggtatagattgtattttcaagcaatttttgaaaacccaagtggacattcctgttcctgatactgttgagtctggtcatgtgtggatcttgtcacggctgtggaccaaaaaaggggagaaatttgttacagaaagagcttaacttccaacatgaactacataagtcagaacagatgtgatttctttaaattcctggaaaactgatatgagcccacccttcatggctactccagaacaagacaggaatctcacaccatggcaaaatctcacaagtttgtatcaaatggtgtcaaggctggggacttgtaaatatgacacatctgggtcctgtttcatgaaacttcctttaatattgagattctgtgtccccctccttttatctcttagttgttcatacccattttcttcttcttgaatgactttagcaaaaaaattcatgtccttcaaagacacatagaattcacacataaaaccacttggtccaagactgttttgttttcttcccttaaaaaaaaaaaaatcttgccatttatcattaaatgccaaacactgtacaaaagacagtagagactgagataaatactatgcatgcccccactggatgtggcacacttgtcccactgcccatgcattggtagaggagggtgactaaatgtagtgcctcttgggctcaccagcgactgaggtaaggagtggcttgctggagatccacatgtattatgtatgattctcaatgttcctcttgtatcccaactttagatcttcacctcatggggaagtctcgtcattctggctttttctttcagcaatatgttactgcttggattagttggcatttctgttgctgtgaagagacaccatgaccatgggaactcttataaaggaaaacatttaattggagctggcttataggttcagaggtttagtccattgtggtcatggtaggaaacatggcagtggacaggcagccatggtgctggagagaggttctcatggcgcttgtgagttctacatctggatcaacagggagagagagagagagagagaaagagagagagagagagagagagagagagagagagagagtgccactgggcctgacttgagcttctgaaatctccaagtccactctcagtgacacacttcctccaacaaggccaaacctaccccaacaagaccatatctcctaatcctttcaaataatgccacaccccatgagcctatggggccattttcattcaaaccaccacactgccatttgcttcttgctagcaaagtgtaagaccagtgacttctctgtcatccaggtgtacctcagggtttggactgggttgggggttgtcttggggggaagtctaccctctctccagtgctaacttcagctagtgttttggccaaggaacaggtactactggatgcggggtttctttctcttccctgtctgcagccatgtggaatttcattgtgtcatggtggtaagagtgcctccctttccacccagcccagcccagcccagcccagcagtttactggagtaccagtggtggttgatcacttccatgtacagcatgaccaagatcattggagcagtctataagcttgcaagtgtctgcagtgcccagaaggtctgtgctttcattgtagcccacacttggatcctaataagccattgaaggtttctgctgagaagctagagaggtgacttagtggttaggaccacaggctgctcttgcagaggacccaggtttgattgccagcatccacatggcagttcccaactgtaactctattcccaggctcttctggcctccacccaagaaaatgtaagctacatttttgtcacagggaaataacacccccaactttctgcatgccagataaagatttttgacaccattttaattggtatggtttgttttttcaatcagttcttcaaattcttctagtaatttaaagtttttgggctgggcgttggttttttttttgagacagggtttccctgtggctttggaggctgacctggaactagctcttgtagaccaggctggtctcgaactcatagagatctacctgcctctgcctcccaagtgctgggattaaaggcgtgctccaccaacgcccggcgaaaactctgtctcttatgttgctgctggaaatgcattttttcctgaccctcaagttgcacttgcagaaatggattccaaggatactcaggcagagtgtaaaactatcagtatgcagatctcattatcacagcagccctgtttgtaactacacacaactggaaacattcaagtgagtgaaaaagagggggctgtgctgcttagcttcttgtttttgtcaacttgatatatgctagaaacacctgggaagaaacaacctcaactgaggaattgcctctatcagactggcctgtgtactagtcggggggaggggggcattttcttaattagtaattgaggcaagaggttctagctcactgtcggaggtaccactgttgtgcaagtgagtctgggtagtctgagatagcaagctgagcaagctgtagaagcaaggcagggagcgtggtcatggtctctgcttcagctcctgactccaggttcctaccttgagttcctgttgttgcttctctcagtgatgtgacctgtaagccaaacaaactccttccttctcctaagttgtttttggtgtgtgctttatcacagtaagagaaagcaaactatgacaagggcaggttagcaaacaagggtacatcaaaatatcaaaactccagaggttatgcttagggagagacagcagtcaagctgaaggactcccagtagcctcgactatttggatgttttgagtcataagcctctgtttggagggctctcccgtgcattgtatgatgtccttctagttcagtgtaaaatggaattaataaaaacaaaacaacaacaacaaaaaaaaaaacaaaatggaattaatatctctacatgatccagaatgatctctaggatgtgctcataaaagggcaaattaaacaacaagatagtgtgaaaatatatctatgttcatgcctatgttttcaaaaagaaatgaagtatcaaacaaaatcgattttaagataattagttttagcaggatcccaagaggacaggtgggtggaaccaggttggttggataacaaatcagcctgaatgtgccctttaaaaatagttttgacactggcactagatgcatgccttacatagttagaaaacaaactaaaccaagactaatgagttcttcttttttccccaaaggaaaaaaataaataaatcaatgttcctattagggtgatcatataccataaagtaagcaattgttttgagaaaacataaaataaggatttctatttagtaggagagatcctactataaaacaaaactcccagaagcatcaacaccatggatgctttaggcagagctctcctgtgtattgcaccaagtttatcagagatgctggctggcccatttccacggcaatcaacaccatctcccaacattactacacatcttctgggaaccaaaattgtcctggttatgaatggtattaccgctgaaagggataatctgaaggcaaaagttttttaggttgaaatgaatcagtgaataaaggaaaagtttcataatgagagtttatagtgttctgcagcactggaaaagtcatctgttttgtttctaaatgtccttttaccaattccctttgtccccccctttgcaaaatctgagatggacacaaagcttctggaaatcccattctctctgtcttccagaagaccttggaggccaaatccttgctacctaatttaatattcattttttatttgcatacacaccaattttatacaatagtgtcttcaatgatctggaaatctgagcgtttcttccacattgttgcacttctactgcatggctgatttagcctgccagtggatgaaggctgtggtgaggagcagcttctaggacatgggataagattgtcaggtgcacagtggactaccctggtgtgggagcttcctctccccagggtaagagatctgggaacctctgacatcagaagtccctgatttcttgccatctcccccacttctttgctcagcacagctcaagactaggtacataagagtgctgtcctgtttccatggcatctctactcagacacccttctgggggacactccagcctcactgctttcaataagatgctagggcttagcatgggagctagcagaattccttcagaactatagaataaaagggacctgggaggatcttgattggcccagtagcttacaataaaatctttattaggggctagataattactggccaagccctttgtgccctgaccaataactctgagcttgaagcctctccagtacatatgtgtttaaaactgatttttgctgcagccttcctttggtttttctttattgttctgtcaaattctatctatacaaatctttaaaatgccggaactgtggttgttgtgatgttcttgttgttatttcagtgtaattggaggatggtggggtgggaggaagcagataactgtgctcaggctgccaattagatgccccattttcccaggcaccagggtataagtggactgtgtcatattgtctgtgtggctttgtattttgcttggttcttttttttttaatcaccaggacagcatggtttttgaaaacattatttctagtgattatatatcttgagtgaaccttagtaatgcattatactggggacacatacacttagtcattttatctcttccacacaaaagaatgagatgttggagaaaagaggaaatgtcagctttggagacccttgagatcttggctattggagctttataaatgcttctcagacattctcattgtgctggccagtcttatgtcaacttgacacacaaactagagttatctgaaaggagggaacctcaactgagaaaatgcctccataagatctggctgtaaggcattttcttgattagtgattgatggggtagggttgagcccattgtgagtggtgccatcccttggctggtggtcctgggttctgtaagaaagcaggctgagcaagcaagctatgggaagcaagccagtaagcagcacccctgcatggcctctgtaccagttcctgcctccaggttcctgccctacttgaacccctgtcctggcttccttcagtgatcaacagtacagtagaagtataagcttaataaacccttctccccaagctgctttttggtgatgatgtttcaccacagcaatagagacactaaccaaggggctggagagatggctcagtggttaagagacactaagacaccaactcttccttccattgaataagtggcaatttagaacaggctaaagcagaaagtggagtgactggctgagaaggagatggtcatatgtgtatcccaacgttttttatttgatttctcctcccttccattttggctgtttccaatgaagcattatttttagttgaaataggaaagttgagattttcttttttgttattaatatcctagaaacaaacactcatctttggaacatgatgtttcttctagaaaatatcacaggatagttgaagtgtttctgaaggatgtgttgctcagttacaggtgtacaaaggtgtggaaagatgatgacttgccctgtatttacgctgagagacattttctcagagccagaagctaaagaaagctgccagcattccttgacagtgacgataaactggcaggattgtgatcctagatttttagagaccgccatttaagtttatcagatgattagctcactgcacttgaataaaggctggaaaccacaaagcccagaactacttgttttgtcttataggcaagctcagaacagcagaagcagaggatccccacttcctgtctaaaaccttgagaaggaaaatgatggttctgttttcttttctttactcaatccatctgtttatttaatgtgagtcactggtgtctggcacaattattataactcaataattcctcacaaatatttctttttttaagatgagaaaatgggatttgaatataaattatcatctctacatttagtgtttttttaaaaatgactttgattgatgtgaccatcttccagcacatgggtaaggttggccattaaatgtgtaaatttgcttagcaaatttacaatgaatggtaaaattgttcattgctgcttatgggtttctaaaatacaggctcaccatatatatatggagaacattcctgagttatcaactggaacacaagaggccttgcttcatagcaaacaatcctaggtgtcagcaagtgtagatattgaaagttagtttcttgttcaattacagtactcacttacatagttctactggggttctgctgtattgtcagtttagaactcagctgattagtggctaaacagtggtagtcacaggagaaaacataaacctcaagggtcctagactggtaattaacatctgggccccagagatgtcacaagtcactctgttgtaactcattgacaataattggcaatatatacccaaccaaccctaaggagccaagaagagtaaatttaataagggcccagacaacctgagtagccagaaatatttggtgaacaggctagctctgctcactgggcctgtaaacatgtaccaagtggagcacagagaatgagacaggagctttgtcttttgaggagacaaagaagtaaccttcctgaatgcaaagaagatggtgcactccgtaacctatagtttaagcatcacattagagtaggggttctcaacatgtaggtcccaacccttttaggaaacctctatttcaaaaaaaaaaatgtttacattacaattcataacagtaacaaaatacagttctgaagtagcaacaaaaataaatttcatggttgggggtcaccacaacacaaggaactgtgttaaaggtcatagcattaagaaggtgagaaccattgcattagaggtaaaggtggttaatgttaagaggtcagctatagagtcttacagatgagcttaaattcttgagatgttgcacatcaatgaagggcatgttggagagatgggaacctgcttaagagagttttgtgaatggtttgacacagttaaggcaagtgtgatcatgacagcaggacagaggcaggcaagcaaagggaaggatggattgcaatctggggacagaccactgaggtcctgtgccatggagagagagagtaactcaatgagatgcttacagttttgccaaaattatatcaaatgtagtgtcttcaacaaaataaaatttccatcttgacacatttatgtttcttagaagaatatgttctcatgcccattaaagtaaaataataagaatgtcagcagggacggcttgaagcttgttgggtagtcagtaaaaatgaacaaataaaataaatgaagggatagggagaaagccgaggaagacagcatcaatccttttctctttatcatgttctgagtactttatttactgaggagagacgtttggatgaagcactgatgaaatagcatccaattctgcatgtcagtgactttttcttcttcctttattcagcctcggcttgtgaattcttttaatgcttcctcatagggttggttctgcaattctttaaccaaataaagtagataatgtgattgacatggcagacactgtggacacagctaccatctaggctcatgcttctcagactcaggacttgtcgtgtgaatcacctggggaatcgtaagagtatgcagactctgatgtagcaggactagggcagaagtacttaaccacctgctaagtgataatggtggtggaggttaagatgatgatagtgatgctgacggtggtggtggtggtaatgagtgtaaccctatctctgtctcagtggggtgaggatattaaccagtctaactcaatcatggtcattttgtcctttctgcccgtgttgagcttagtcatgtgaccagtcttgatcatttttttttttaaaaggtgaatgttggtcggagtggataagacccttgctgcttccttgctgtccttgctgtcattggaggttacagatacgaaatccatcttcagagctgctgtgtacatgtcacaagtgtataaagaccttcctggtccctgggttctttccacccaccatattactgaacactttctgtcataagactatttattgtatctcccaaatctacattcacttctctatcaacttgcatgtcatctatatctatctctatgtctttaccagtttcagtgccaaatcttcaactgcctactcagtatgtctacccaggaagcccactacaagtccagtcaaagacaggacatgggaagtagtctctaccttaggctccaagaatagattgttaaattcttcttaaacacccagccaacctcgccttttgtttcaataagtatggccaaccatgggcttaaccctttactggcagggactagagcaaccatgttcagcttacctggtgagcatccttaccagtgggattgggtggtgttacccatcatggtaccatttggggtttactacgctctctccactgttattcaaaacttgctccttgacacaaccagcttccaaattatgtaacctaaaacctgggaagtccttctaggtcctcctggcttcctttacatataacattccctgtctctttattttgtttaatttgtccctgcatccctttctgataggtaatttttaaatccctttcttcctctctattacacactactatcttggcccaaatcactgacctgtcacttttggactaggacagtcaatttcctagctcaccttctcaatcagagggattgattaactttaccactacctttcttaaatctggaagtcaaactacgctacagtgtcatggaaggccttctaagatagtctctgaccacctctggggcctgtcccagttgctaatctgagctgtttatggtattttacatactctgtcctgctcatgactgagcccttagggatgtcttttgcttcagaagctctctttgcttgtctcttttggattttttaaaaattaatttattttttacgttctgagaattttagacacaagcattgtatttattaccatttctacgccttcttctccaccctccaactcctcctacggtattctaactcctctcaaattaatgacctcttctttatttttcacacacacacacacacacacacacacacacacgttctggtggttagtgttttgttgacatgacaaaatcacagtcatatgggaagacaaactttaattgaagaatttgtattggcaagtctgtgggagcattttcttgattagtgattggtatgtgggagggccaagctcacttaacagtgctgctcctggccaggtgaccttgggttgtataagaaagcagactgagcaagacagtgagagcaagccagcagtcagtgttcctccatggctttttccaccagtcctagtcttccagatcttgccttgagttctttccccgacttccctcaatggtggactgtgacgtaggaatataagccaaataaattcttcccaagattggttttggaagcggcattaacatatgcatacatacacacatacacacatgcatgcacacacacatacacacacacaacctactgagtccatttagtgttgcctgtatgtgtatgtgtttatggctgactacttccgactctctccctgcacttctgcaaccattctttgcctgaagcttcacctagggatgggactttgtgagatttcctttatccatattggtatgtcaactggtgatgttgtgccagtattgtttaggaaatcacattgttgagatttcataggtacagcttccctgccatttaaaaaggcatcatcatcatctcacagcaggtatcctggtcctttggctcttacaatggttccatgatttttcctgagcctgaagtgtatgggttgtagtacagttgtacagattggggctgggcatctcatagtcagttgttctctgcattttggccagttatggttttctgtaatggcctccatctgatgtaaaaagaagtgcctttgatgcagggtgaaagctgcacttacttgtaggtataacgataactatttagaatgcagttgggaattatccaggtttaggaaagtggcagctgtaggttctctctgatggtccataacctcacgagtcacaggtagcggactaggtttacagtaaccaggcatgaattcctttctattgagtaggcttccggtctaattgaaagagatgttatccccaatatacaaataccactgttacatgtttgcagctatcttgccacactggtggttgtggtaggtcacaagctttacagctaggtaggactccctttgtacctccttcaaatagtatgagagttagtcactagggaaggcttccaggtcagttccaggcatattcctcagaattctgtgtctgaagtgtgtgctgtcttcagcaatagggttttaccttcaagtcctcagaggcaatcaagggcaacagcaatggcctgtattgctctgagagtctcttgaactcccctgacagaaactcaaaggtgattttctataactggcagaggattttgttagatagtccatgagtggcatcatcatctcaaaagtggcataacttatttaaatgctctctctacttaaatgtatacacatatattacatatattaccattattttctttttgttgctatgataaacaccatgaatcaaagcaacttaggaaagaaaggatttatttggcttacacattccaggtcactgtccatcactgagacaattcaaggcaggaactcaaggcagaacctagaaacagatactaaagcagaggccatggaagggtgctactgactgccttgccctccacggcttgctcagcctgcttcctcacacaacccaggaccactagctctgcaatggcactgcctacagtggggtgctccaccccctacatcaatcattaatcaagaaaatgtcccacagatttgcctatgggtcaacctgatggaagcatttttcttaagtaatgttttgcctttccagatgactctagcttgagtcgagttgacaaaaaacaaacagcacatatgtgtttttaagtaaacgtaaaacaatatgcttccctgtggcttttctaaacatccttggtgttatttattcctcccgccccctctccatctgtataggcctccatccctcctccccagtcaaagtccccactgtgctgtgttttcccaccttccctttcatagcacccatggcctgctattcccccttctagagctccttctcccgacccctaccaccagtcctgttagactttcctagtttctgcagttactccatgctctctcagcatctctgaagatttgaagctggaatccacagatgagagagagcatgtggtgttcatctttccaggtctaggttgcttcactcattatcgtcttttctagctccatccactttcctgcaagtttcatttttctttgctgtagaaaaggattcctttgtgcgtatgtaccgaattttcattatcttgttcttcacttgaaggacatttaggttgtttcattccccagctcctgtgaatagaacagcaatgaacatggctgagtaaatatctcaggagtaggatatcacagcctttgaatgtatgccaaagaatatcagggtcaaatggtaaatctacttttagtttttcgagaattcttcaggctgatttccacaatggctgcaccagtttacatttccaccaactgtgaatgaggggttccctttccccacatccttgccatcattagttatcagtcattttcttgatcttagtcattctgactgttataagacaaaaatctcagtcatcataatttgcattttccagttgttaaggatgttgaatgcttttttcatcttttattgtgtgtatgtatttgtgtgtgtatgcacatgtgtacacatgcatgtagaatacagatcaatgctgggtgtcctcttttgtcactcttcaccttatcttttgagacagggtctcttactgaatctggaggtcactgattggctagactggctggccaatgagctccaggaatcttcctgtctccacctccccactggcactggggttttcacatggcttctggggaaccaaactcgggtccttatttagttgctgtaccatctccccagctctgccctcaactcttccttgttgaagcctcagaggctgtcactccaggagacttctttggcttcaataagattagatccttccagaacaatgcacaacccagttgaagttcttcatttgttctcaggtttctattccctgtgagatcacaaacacttgcaaggcagaggctctgcctgtctcaaccctttaccatggtactcacagcatcaaacccagggtctgacacttggcagtggagtaatcattactttgtcactagatgtgtgtggtggtttgaatgagaatggcccccataggctcatatttttgaatacttagtccccagctggtagaagaattgggcagtatggcattgttggaggaggtgtgtcattgggagcaagctttgagagttagctctctctgcctcatgcttgtggatcaagatgtaagctctcagctattgctccagagccatgcctacttgctgactgccatgctccctaccataatggtcattgactctaacactctgcaactgtgaactccaaattagatgttctcttttataagttgccttggtcagggtcttttgtcacagcatcagaaaagtaactaagatactgtgtgccaacacatgtctttaaattactcatgaacaactataattttacttctttagatgaacacctaattccctgcaggtggactgttaacatttgaaacattctaggatgcttgggactgtttaacagtccaagtagagactgctaggtgtggctaaagttcacacatcatcctaataaatcctctgactttgttattcatctcattgtaagatcctggccaatcagtcctgagaaagatttgtcccagtctagtttctctgttcctcttcaagtgtacccattctcttccacactcctactgccattcattattggtctgtctcttctggtcccaggtcaatgtcaggcctataaactgacagagacctagcaaagccaccggcttggataatgggggccttgtctcttttgcatgattgtcctaaaaagatactgcagtaattctcttgacccagatctttctttaaagttgaaaattaaaatgagatttcaccagctgctttaagtaatatagttaaatattacagcatggttaacccctgcctcccaactgttactcttatgacgtgactctgtcttgtgctgaccagctgctgattagacaaccatgaacaagctgctgaggaggtaacagggaaagggatgtattaggctttaataatgagcaattgaacattccctagtaaccctgggacaggctgtggaggatcatgggttgcatcctacaagaccaaacatcaccatcttttttctttcctagccaatgaactaggcagggaagaacagactcttaccagctgcagccagacctcctctccatctagcttgggaaagtgtcagaaaagataaaagcttcaagtccagcctgagatatggtaggggcagggaaggataacactctcctggagccgtgactctagcagcatctttgatatctgctacttgtcatcccttcccccagtgctgcttagcccagggaaagcacaggccattttactataaccctctgccattggcagagaaaaacaggcactccatccctcatcagaccacaggaggcctctgctagaggagcagactcaaatcctattccaatcaaggccttgacagtgtgtcctctgggctgtttgggggagacagagaggctgaatggttgttgtgtcttgctggtttcagggagtgctatcctgaggcttgtggaaaagctccagggaagtcattttgctgttgaccatttcactttggggcactcttcactatttccatttaatgtttcatagagagtctctcaattattctccttcccttcacatcgttcttactcgccaacccctcatgccacccatccctcttgctagtggaatgtttttgaagaagctatctgctttggtctctttctatacatggtacttgatagtgatgttgctctccaacatccttggcttcctctgtacttctagaaactctgagagggagaaatgcagcagcagtgaagggagaaactggggacaaggggaactgtccctcaacagggcttcaacagtcaactctgtagggatctctaaatatgatgtccctctaaagcagtggtcctcaaccttcctagtgctgtgaccttttaacacagttcctcgtgttgtggtgaccccccaactatcaaattatttcattgctacttcataaatgtcattttgctgcattgtgaattgtaaatacatgctatgaagtatatctaatttgtgaccccagaggagccacaatccacaggttgagaaccactgccctcgagtcatcccaagttgaagcaagaagggatcatgattttgtcttcctggtcaattagctcttcctgggaggggctaattcttgagcgaggtcattgcctctgttggaaagaaggctctaatgtaactgggacataagcccaaggcctctaaaggactggcggggggggggaggcagtggtggagcagccttaaggctgatggtactttgaaggggacaagtttggcttgggagtgtgagggaaagcaggtgtgagggaaagcaggaaatggatctgctgtcactacctgtgttaccatggaaattattgttcccttctgtgggttcttagtcaaatctgaaaaatgaatttagaaacagacttgggaaggaagcctgaggacaattttattggcatttaagaaaaaaccaaacaagcaaaaccaagaggataggcaagctgtaaatcctggcagctgccaggaggagaaaagggagaaaggaatgagagaaagtcgagctctttgagttaaggtcccagaaagaaggtttgttcagcaatggaggccagctgctgctgcatagaggaagtgggagggggcttcagataaagggcaaaaaaaccagaatattaaggaatcatgcttaggctttcaccagtgtctgaaagaaattgaagaaaaagaaaagttaggcaggcttagcagagccacatgtggagcttcattagggttgaggggcctctgggatgtctaagaacatcatctcattaagaaaataattattcctcccatctctttatcttgtcttcaagtgaaccagatttcctggggggtggtctcctaactagcgattgacaggcccagctagattacttttgagggagaagacaatagtataaaatgttctaatctttggagatcagaatgccatgcctccacctagggccagagttagagtctgttgttttaaccaggagacttaagaagggtcagttgagatgtttttctttctagagttaccaggaaaataggaggtggggcccaaaggcaactatgagagagaggaatggctttgtagccatctgccacatagtcttccagttaagactaggtcttccagttaagctttgccaagcactgtgaaaggctccatcactttcaaaactccccatcagcctctcttggggatcagtgacttctctgtcctccagactgtggactacatccccgcccctcacagagaatcctaggcttccggttcctgatctgcatgttatttgtttagcttggcattgagcttttaaatctgccactcagaattctgctttgactttactgcattagcaagactgggtaacttagaagaaagtccctcaagacaggccaaaactccaaatgaagttactatttctttgtctggatatgtatgggtttattttttttcttgttgttgttttgttttaatattgatgcaattttggcttggcaagaaagtctcatttttctgtttttctacaattaaagtacattagtagtagtagttactaagtcagtaacaattttgtaaactaagatcctgtggcccagactctggagatacaggctgtgagtctcaaaagcctataactttctcagcctagagaggctggagcagcaggaggctaacaggggtacacagggctatctgggagcctggcttccactgcctgtcctttctctagtcagccaagaagggacaggtcctgcagtcctttggatcccccaacagtgaagagctggatgcttggtttttcagatatccatgtctaaagacatttgtgtctcctggccacccagcatattccttccacttgcggccacccaaaggtcactaaggaatgtgagattcacccagccccaccttcctgtccctgttctcatattctcaaacaagagtccccaacatctgacaagagaccctgtctaaggtatctggcactcctttttctgtccatattatataaccactgatcataattatcgttctgtaactataactctctttctttctttgcttctctctctctctctctctctctctctctctctctctctctctctctctctctctctctctctctcagtttttcgagacagagtttctctgtgtaacagtcctggctgtcctggagtttacagtgttgaccaggctagcctcgaactcattgagatctacctgcctctcctcccaagtgctgggattaaagtcatttgtcaccattgctggacggtattgtaactcttatctagcaggctctgtggatgacttgtctaagccttagggactattttcacttcagacagaaaactgaaactcaggacagtgaggtgctacaagacaaggtagagatcttcaggatttgtgcctcatttccccctcatgataagaaaatgactgtttgaaaaggcctgatttgttatgactgtgttatgaatacatgctcttattttttccttggctttgttctgtcatccgtgcatacttttgtgttaatatattgcgcacacctcggtaacacttgtttttctccacttcctccttcctcataaggaagatactgtagagctcagactgttagacaagaaacccacacaagaatttaaacacgttccttttccactcactgaatccatttttgtagtcacttcctatttattacaagtgacactgagtttccatttatactagagaatgtgaaacttctttttacagtgaacgttaaggctagggctggagctcagtggtagagcacttgcttagtgtatgtgaggctttgggttcaacccagcataccacagaaccaaccaaccaaacaaacaaattttaaaaagcagaatcaatttaaaaaaaaaggcagtacctagtagccaaagggatacttggctgtgccagtcagctagctcaaagaacagccttgcattacacattgaagcatttctatgtcatgggttcctcaggatgagaatagctcttccctacaaggttatcacacagtttgaatatgttaacctaagagtatgcagcggcactgagacactctagaaggagaagctgtgcaaatgcatggcattaggaaagattaccattcagttcttatgtgcttcctgtggaaaggcatgctgggaaagcaaagacaaccaggggcatctggcatttaaagacagatttatttgggaaagctatacttaacttcatacagttctgtgaggttgcagagttaagggaaatttttactgtgatgtatacctattagcatgtactttaaaaatattcaaactgtatttatttcctttataaggaacataaagtctctgaagtgtcctgtatgtttccccagctgctccctcccatggggaatgaagactaatagtcaacccgccgtaagtgcttctaaatttgttaactaagtacaggattttatcctgagaagtataattatgaggaaatggaattcaggtagtgtgtgataaagcacccaagtgtatagaagtacaaaatggaagcagtgtgttcagtcaagactctgaagaagagcttgagggacatttcgtgggacttaatactttctacagctttctgttcaatttctgaggccaagactctctagtatggggtgttgatcatcagaggcagaatgtaactcaccagaaggcaccatgcaagttgccaaaggaggaaaagaaccagtagtcctactcaaccatgatgactgcaaatcacaacgacgaccagcagggctggttaatcctaagggtgcaatagtgccacacataccttagctaaaactgacagctctctcactggacttaaagcctgctcaacaagaaggaaaccatgcctagtaaaggaaacctagcccggagctaatgaaatcataagtcttggaggagaacctacaaacaccactttacaaaaccaggacaatccctagcgacattctaaatattcatcttcatacctacagattaatttaattctcactacttatcaaggaaacttctctttgcagcagatggagaccactacagaatggcagggttgtagaactcagtcccagttgatagcatctagaacacaactcttgcatctaaggctcaggggagggaagactgtaagggccagaggaacaagaagttttctgtgacattgtgtcttctagaaatgtcagagaagtgatacccggaaattctcaccaacatggacatggcttcctacacaaggacaacactaatagatatactgatgtggaagagagaaagctcaggaggcaaacaaactatagaaaaaaaaactataggcaactaaggattgcagagtgggatgaatagtcttccccagggaggaacaagccaaatggttatggaacaccaaatggaaacatacacatggaggaaacatatgaactgagtgggtaccagttaaggaaaaagaggtaattaatttgatagaaaatggaggggataacatgggagatgttggagtgagggaagggaagggagaaatgatgtaattatgttgtaatctcaaaaagaagacggggaaggagaagaaaaaaaagtcaattttatcttctccaacttttggcaaagatcaaaaaaaagaaattttcaactttacaaagggatcttcattgttgatatcatatacacacagaacttgctgtgttaaggaaaatcatacttcactaacttcgtttatctctcatataataccttactgagtatgtctggggcccttacagataagtgcttcagtatgaacgagaatgacatctctggataagctcccagccacaggaggcaagctgtgtaagttcagtctccagctctgtcacccaccgggtgtctaatacagagcatgcggttgaactgctctctgctctgttttcccgcacataaaatgggatgacaatagcacgtcgtggtacgtgtgagacttgaaggtgttcagagagtgcttagaatagttggtaaccctccaaatgttctgtgaggctgtgattctgacatcatctgcaaatctaccatccgtgtgtcatcagttagcccggtctgctccctgctgtgatgcagaacccctcccatacccccaaactgccctcatctgcttcgctacagatgtctcccctccatagattcctacagctgagaaggggcagctgtaaattaagacctttagaccaggaagataacccagagtggcctttctctctagtggatgtccttccttacccactgtggggatggctctgagtcacctcatgacttgatccaaacctaatccaggtgcccagagcctcctgcccaaactcttacgtacacattgtccattgtttagactctgcttacaagtgaaagtatcatgtcttccttccccggccaaggttgaagtctccaccgaagcactcacttcttgccctgattcaacctctcctgagaggactgagaagagaatgtccccaagcccctacaccagtggagggaattttcctaagttcttttcagggaagttgaactaactgataataagtgttcaggggcagggaagaatgcaagtgcaaaggggaaaagccacagtttaggatggggacagtgatagatgtggccattcattttccaaatatgattttaaaatgtacacattgtagtagtttgaatgtaattggcccccataagctcatagaaagtaccattattagaaggtttggcctatgtgttgaaggaagtgtgttactgtgggggtgggctttgatgtctttgtagcttaagctacactcagagtgacgcagttcacttcctgttgcctgcagataaggtgtagaactctcagctccttctttagcactatgtctgcctgcacgctgtcatgtccaccatgatgataatggtctaaacttctgaactatccaattaaatgttttcctttatgagggttgccatggtcatggtgtctcttcacagcaactgaatcctaactaagatgcatgtttataggaggagggaaagtgtgagtgcaaatagttgtgagggggtctaagtagggagaggagtggtctggacagactctgtagtttgaatgagtgcaagggacaagcattatttagaaagggaaacccctgcaggtgtggttaatatcctgtcctttccagctagaccatggggttttcctgatggaaggcaatcgtgctcccttgtggtgatatcttgcttgtacaaataaagcttgtctgaagatcagaagaagatggagcttgccactagctaaccatagaggtctggaggtctacagagagacagacaggaagtgagatgactgggcagaaacaggaagtgagatagctgggcagagagaggatataagagggaagaaacaggacctcactctctttcctgctgggaagctatcgaggtgagggcacctttggcttggtccttcttgtctctgatctctcagcattttcctctatatctaactccgggcttttgttgtttagatcaattaagaactccatttacactccctggatagtctggtcttaatgaagataaaggaacttgtagggaaggttgatcttactcttggctttgggtaaagaagccaggatgcctttaaaatcttttcattttatgtagatcatgggtcatcatgttaaaaaagaaaaaataaacccaccatgtttaggattatctttccctgggtcccagcaccagataccatctactagggtatgggctagcttaatcatgacaagacaatctcagtcccaccagggtctgatctagggcctgtcaggaagagcaggcatcgctgctctggagcatcagcaggtgggttcttaaccttccagccctggctgattgacatttccagaaacctgagttcagggttcagtcttgtccagaatcactgtgagccaggggagcttggcatgctgagaggcccaggtgtcgatgtaggagtcagtgttccctgctccatcaatgactgttttcactatcttactgttttgaaagaatgtgacagtccctctgggaagcgattctatttatagtattgtttctatgggaaagtgttccaagcgacaatcagtctgagatggatggctagagggagctgataattgtttcttcacatgtggggattgcactaaggctttaaaaaaatctagtggaaacaaatagagtgaggataaatcaggtcttgggtctcgcaattttagagaagtttcagaagttgtcttcttaaataagcaaaacttactttaaatgataatatttattgagtacttactgtttgccagcaactgagttataggcctatatgtgttatctctttcagatgtcacagctcccaaaagataagatctgacctcatttattccactttttaatttgtatcatttatttattttcagagtcttatagcccaagctgaccttgaacacatgaccttccttccaaagtgctgagaagggtgttggctgcctggtgttctgacccatttttgatcttccaccacttatggttttcagtatgggtaaactgatgaaagaatctctggttctccttggtcctggtggaaattcaaaccatgtaaatatcacctgcaatgaggagtccttatctcccccccccctgcatccttctgccactgtgaaatgcttctatcactatgacaaagcacataagagaagtgacttgaaaatagcaaaggtttatgttggctcttgacttcagaagtccctatctgcgtggttccgttgccttgaactgtggtaagttggaaaactatgggaggccatggtgcagaaagcagctcacattatggtgtgtgggcagccttggcctctggtgcaggggttcactctgttcacttacctctgcagctcactagagaaatcagaagggctgtgggctccacagagcacaggcactgaggcctgggtacacagtgtcttcctaggatgtaccagcccttgtgttaccagcatgagttcatagcagaatagcaataacaacagtctggccttctctacctggggtcagtgctcttttgaacattagtgaagagagctatactgagggcttttgtctttcctaattgttcatgaacattgaacacagaccttgttccaagctctttccaaactttctttgttgttgtttgttttggctttgttgtggttattttgggaggtactgggaattgaacacaaggatggccttgaacttgggatcctcctgtcttagcctcctaagtagcttgtatcacaggcctgagctaccaggccagacttcagtgtgtgttaagtcatattgctctcttaacagccctgtgagataaatgcccatatcatcatcgttattatagacaaggaaactaagaaaaggcaaagtcaggtagcttattcagtcaccccactaaaataactggcagtattgggatttgaacagaggcagtctggctcagagcccaaactcttagcacagagctctgataccttttatatggtatacacataaagaggtcaataatcaactcagcttccaaggatttcattcttgccaatgcttagctggatgactgatgtttaagacaaaaagctatagtaaagacacatctgtgggtctcaccaaagttccatattatccacatatccacttaacactcttaggaaggaaagacaacattggctacctttgacatgtctacctttcgccaacaaccagaagcttgtctttgtaggcacaggcctccaaagaagacctttgattggcttgcaatcaggaggagttgttgagttaccaagagtcccttcaatattacctttgacctaaatactgccccaaccatcattgcacagaggcctggagttttcagtaattgccatggaaacctagaattgttctttctgtcttgtgccatctgtctgagtaaaggtacaaccaggaaagtagtgatctataatttctcataggaaagtccctcagattcacaggaacaaaaatatatatatatatatccatctgctttctctccaagctttctagcaacctctctgtagctaataaatgaagttgtgttacatttttgacagctgtttcatagtgtatgattcttggaaacacaattacacagaaagttaggattaagccatctcaaaaaaaaatagctctgcaccatataaggtcagcatgaactacagttgctcacagttggagaaatgttggaagttgtcttttatttcaatctgggtaccagaggcaagattcgcttcttttaaattggacccccgatcctgtctccctcaaaagccttgggcaaataatttacccttgcccatgaacaaagatagattaataatggcttccatgcagagccattaaaagataaaagagcctgggaaggatttggttgaggtgggggctatatgattttgtggaacatagtcattcctttgaggaaccaagtcaaagccagagggtaaagtttgggagccgaaatgtattcagctcagtggtttccagttggcctgtgaagtcctgagtttcttctgatttcccttgggagccaatcgaggtaagagacaaactaaatgaccttccagacctaacgtcagcaggatacggctcatttattggatattgaactgaatgttgtcatgaagctgattttagaaaaggactccaagatgtgcacattgagaaggccctgatgtcacccagccatctcatttcacatagaccactaccaggcacaattcaatgccaaaacaagaatgagtcaagctgtcttgcccaatctcttcctgcccagctattggccagtcagctttttattaataatgatagcaatacatatttacagtatataaagattgttccacagcatatgacatcttcccaaggacaaaagcttgaagaaaatctccctttatatagagaagcttcataagaccattgacaaaatcatcatccacacaaaactccaattgtcttcacaatcacaaaactgcatctctccctttgaataaatgattcagggatttacagcccaagaagttaagattccctgaagagtgaggtgagatgtgggtgtgaagtggagcctgagtttttaataggtagatgtcatggtttctaataactgtttatttctgtagcctgtgtcagtatgagccatcatgaaacaggccgtctctggttgtgtatacagagcaggcataagcttctaaagaaggaacatgggaaatactcatctgagctgtgaaagtgtgggcatgttgccatgaagcaaccctttcagggaggtttcttgataaaaaagcaaatccaatgtccaggaacagaatttcaccacctagatggcacttggagttttcctaactcaagccctcaagtcaatgggaaaggaagagggaagaggcgacaggcaatcatttcttgagggagaaaagctttagaaagttgagagttttcatgcttattctaaaacataaagaaacccaaaaaggtgggtggtggtggcacccacctttaatcccagctcttgggagacaaaggcaggcaaatctctgtgagttcaaggctagcctggtctacagagagagttccagaacagtgaaaccttatctcaaaaacaataaaaaaatccatctcacaatatgccacacaacaaagatgagagagaaaaataaacaagctctaacaagtctgagttttccctctatcggcaaactgttttttgaaaactcactatgtacaataacattctattctctctctctctctctctctctctctctctctctctctctctctctctctctctctctctctctgtgtgtgtgtgtgtgtgtgtgtgtgtgtgtgtgtgtgtgtgtttgggtaagcatacatgtgtatttgcaggccagacatcagtagcaggtgtctttttgttgttgtttttcaagacaaggtttctctgtatatctctggctgtcctggaacattgctctgtagaccaggctggcctcaaactcacaaagatgcactttcctctgcctcctgaatgctgggattaaagacatgagccaccaccaccctactgatttttctctccattttatagatagaaaattcttgtttcagaagaggtaaataattcccccaagattatagttgaaaactgctaaataagaaggctacagacagatgtagaccctgatagagctcctgccttgcaggtacaaggccgtgagtttgatccccagcacaacacacacacacacacacacacacacacacacacacacacacacacaaatatttgcacatgcatatgcttgtgtaaatgtcttgagtaaagtgccaaacctgtcagatctacagtattttctgtttagagccaaactcttttactctgtattttcaattgttaatagatatgtcatccacaattttccaagtgctgtggtttcaaaacagtttatcctccaaagatttatgtattggacacttgtcccccttaaaggtcctgagagatggtgaatctttaaggggtgggatctagggagtagtggttagctgaagagagtggccaatgaacaggaattcatgctagacttgagcaatgacttatgtcaagcaggggctgagtggttcccaccagaacagggtgctgtgaaggaatgaatcagcccctcccccatctcttggcttctctctcaccatgcactgctgtcttccattttatgacacagtagggagtccttcctaggtgcccagaccacactgttgacattccagccaccagaatcccaagccaactaaaattcttgactttgtaaaacacccagcaattagtactttgttctaggagtacaaaatggaccttggccaagtttgcctatatctaaatctctgtactcatacagtactttggagacatgtttaggaagtacagccggatgtttctagtggttagctcgaagggacaagtagctggcttagtgattagttttctggtaggcaaaccataaaggaaggcatttttcataaggttcctctgagagttcagaaagggtcccaggattcacagtgggtattaacgaaagctgtaaagtgacttctggggaaaccaccaagtgtccactttcaagaaagctctctaaaaagcaatcatcatctgatgaattgcacatgttttgtgtgatgtgtgcttcccatagaaggatggtccagtcatccctgcctggaaatgcagctctaaacggccacatgttgaagaaagacaaaaatcttccccttcctaagacctgcttaagaagccctgcagatcctgtgtctgcaagtagaggccccatcaagaaaagacagtgatgaccaggcagtgatggcgcatgcttttaattccagcactccagaggcagaagcaggcagatgtctgtgagtttgaggccagcctggtctaccttgttaagttccaggacacagagaaaacctgccttagaaagaaagaaagaaagaaagaaagaaagaaagaaagaaagaaagaaagaaagaaagaagggaaggagggagggagggagggagggagggaggaaggaaggaaggaaggaaggaaggaaggaaggaagaaagaaaaagacagtactgagggtggtaccctgatggaggcaggccagccacaaaactttccttcttccagactctgtgcccatagctgggaaccagggttagatgaggaggcaagctcatactactgagtgagtattagataaccacaggaaagatgtattctgggtactttcaatgcctgcctattgaattatcactgtttgcagagattttaagctttaaacctgtgaggtaaaccacaagaaatctggggacaatggactgcctgttcatattaggatggtatgctggttaggttttgtcaactccatataagtcagagtcacctaggaaaagggacatcctttgagacaatggctccatcatcatggcctgcaggcaagtccgtgggtcattttttttttttttttttgattaatgactgatgtgggagagcccagaccattgtgtgtagtaccaccactgggcaggtgggctttgggctgtataaaaaagcaagctgaccaaggcacaacatgagtcagtaagcaatgttcctccgtggcctgggcttcagttcctccctctgggttcctacctcgagttcctgcgctgacttcttgatggactgtatgtcaagtgtaagacgaaatgaactctttcttcctcgagttgcttttagtcatggtgtttatcacagcaacagaaaaacaaactaagacagatggattctgaattcatcctttccccgctaccagcattttagaggctccctgaattagctcacccagtaccaaatcagcttcaaaatcactcttaattttagattcaagtccttgcttttgccacaagcaacaggaagaaccttgagtggagaatgcttcctttgcaatcacacttttatagacacagtgggccaagtctgttccctccaagagaaaaacgtcagtataaacaaagacggggaaacagctttttttcattttcctttctcgttatttacttaatccatgaaactgtgacagcatgggatacaggaattcaggaatacaggaattcagggggttggtcctcaagagtgcaaagctgaaaagccaactggggaaaaaaaaaaaaaagatcagaaagtaaataattgttagtatctcacgctttatgtgacagggaaaattatatgtagaaaaaatgatctgagaaaagtgaggacttgccccaagggaaggcagaaggcggcagagaggacagaggaagtaagcaaggagacctgctatggaaggggctggcccctcagctcttctatttcacacagaccagaaagaatacactggggaaaggaggtcagagtagtggccagtctcaagagagggacccgaggagccctaaatccccagtcagctcataaaagagggtaggaatgagcttccagaaacttctcctgccccaccccctcctctcaggaattgaacccatgatcttctgcatggatggacatgcactctgtcactgaactatgagctatttccctagcttctcttggttgttgatgatgtcctgtggtgcagatggcaggttttaaccatcctatcacagcagctttccattctttgagttttaactgtggtcctgggtactacctctgttttttctctgagctagtgatgtggtcttcagccacctctcccccttggagcccagtttcctcctatctcaagggtgaatgctgggtcatcatttcagccttacattacaattcaagactctgagaggacttgtgtatctcagatccctcactaagttagtactgcacagtccacccacagggactgcagatgtactatagtttaatccgtaactcactttccatatttagatgtaacaagttctattttgattaggtgacattaatacacagtttactctcaccatgtttgactcgaagtgggaacttttatagtcttgagttaaaaccatgtttgggccaggcctttcattccgtcttggtcgggcttcctagtcttctgttctttccttatatgaccttcctcattcttctctctgcttgcccttcataacaccagttttataacaagattctctgtaatcactcggggagggttcctgcagtgatgatgcttaggtcaaatcctcaacatttggatcagaaaatagatggaatgttttgagggcggtagttagaagacagcaaatagtagtagaaatgtgtagataaaagttctcagtgttgtgtctaaaaactgcatatgccaggtttggagaaaaacccatgtttttaagagtttggggacaacgcaagacccactagtaacagctctgggtgcatctccctccagtagctttgcctgaagctgattggctcttggctcttctctatgccacttcctcttctagaggtctagataatagcatcaggacagcctggagattgtagtcctgactcgggctacccaacagactcatcagagaagctttgggaagattctgatgtccaggccctcccctcagagaggctgtaccattgacctgggagatgtgggttgttttctgatgtctttctcaggtgactcaagtgcagaggtgaaacgtgagagtccctcctcaaggatgtcagtacaatctactttagaagctggccattgaagagagaagagtgatcatgttacatgggtgagtgtaacaaatgtgattcttgtagatacccagtagcccagctctttgtccaccatgttttcctctcataatgagacacagtggctgagcggtggtcagacagggtggctaaggggacactagataccatcagataatgtacctgaaattgtagctgctccctccactgagttcttactccagtcatagtatttgtgcagagcactgattagggggaactccagcccactaggtgacagctactcccaggaggagggacgatgactcctttctgaagacattaattagagcatggtgctggagaacgatggacagagaggaacagaggtctgagcctgctctaagaagtccatctttggaccttcatgtaaaacacagtaacttgagtccggcaaagctcccaagagagttcttgatagtagtagcattggtaacaatgagaaacattccccaagtttaagggcagggactttacccataggcagagtcaaaggtgaaatagactcaaatgttggtggctttctacttcactttttaatatgcctgaatatgtacaacatttctttctgtaacgttactaacatcttcatctcaaattttcaacagaccttaccaaaccattgctatggcctgaatgtttatgcccttcctaatgcatatactgaaattccacctacaaatgtgatggtattaggaagtgtagccattgggaggtgattatataacaggggcctttataatgcacttaagtgtccccagagcactgcctccttcctctcttaggaaggaaggacacagctaagaggcactatctgcaaacagggaagcaggtcttcatggaataccagatctgctgctgcctcaatccctaactccccagccccagaggatatcagaactgcagttctgatgtttacaggctagccacttggtgtgttgtgttgtggcctgagtggactaacacacctaattgtttctgctacagacattctcacattctcaggccaaatattccatccaacatctctttatcccctcaccccatcaccatggcactatccctaatgcagatcaaggcataacataggctaatgggctagatttgcctgtttgtttttggtttatggtttatggtaaaattggacattccccttagtgccagcatattatggttagagctcagatgtactcacagtctggattagctgtgcattctcaagtggaaacacatgcaagtttgtggtcagagcttctattcctgcttcctgtagagggtgagtcaaggctctgaccactttcttaatcctttaaatcaatgtgcacctgtccacagtgaaaaggacattggaaccttccagattcaaatatggcaggcaaaattgtactgcgtttccttctggtacatcgtctgctgagattcaacatgccagagcccattgatcttgtatcctcaactactaggaagatagctgaggcttaggacctactacttttttcttactcatttctaaggtggcttgaagacacacaatattttggtaacaaactctataaaccaggacctttaaaaatacatgtaatggtcaggttttattttttaaaaaacaaaccaaacttctaggagaactaaccaggtttcctcaagaaatcatccttcttcagggcacactctcccatcccaagagcctgctgttgagccctacctcttttttgttgttgttttgtttttcaagacagggtttctctgtgtagtcctggctggcctggaactcatactgtagaccagcctggcttcaaactcagagatctgcctgtctctgcctccggagtgctgggattaaaggcgtgctccaccacctacctgtgagccctgtattttaaatgtctacaccattatctagaactgccattttgaggatcaagctccaggaacttgttgggtgacttctatagcatcaccagtcttctaaatcagacaacactggaaatgtgtttgcatccctcagatacacatattcctactatgtttctatccatattggggtccttaatcagggacttaagaataaatagcttagtatcatctgaacatagccatttcaatacagaaaaatgtatagaacttctactaattagtttaacaaatattgactaaaataaacataaatatttgggatagtggtatgtagatagggtatctgtccttgatgctatcttgcttcagatttgaaggtttaaactctcactcccatgctttctcctggcagttaatctttgttgtaatgtaactggatttgaactcacctaagagacacacttctgtgcaagttgaggagagtgtttccagagaagggaagacccaccctgaatgtggaaagctccatcgtaagggctggggtcccaggctttgcaacaactgatcacattccatccatggccagatatcaggcaaaaacaaatgccatgtatcacagtgtgatcagtggccactagctcctgtggccactagctcctacgtccacagctagagctgttcttcccaccaagacttcccaccaggatggactataattttgggctgtgagacaacctacattgtttttgtcagatattattttgtcacagcactgagaggtattatcatatgtgttagcagataaaaataccttctaaacattttattactgcctcagatgttcctagtcctcccaggaacatctggtagcgacttcctccctcatctgtattatattcactcttccaacctgccttggatttacagagccctgttttctgtttcaagctatctatcaacctgaaggctaacttcatgactttacctgcaacacattgttttctttctctttctcggtctccctatcctctcttttcatgtcctgactattctaactcttttcgagatcttactctggcaaaagactcagtgactgagggtatatttcttgatccagagtgatggataattttatgttccaatttgatggagctaagggatacagtgttatacaacttttcctagggagatgcacagaagtgcctgcttaccacagataggagatccttagatcaaagaaagtattccatcaaagtccagcttgatggaccaatggcatcattgaggctgcttacagcagtcatttacaagggcatcattgacacacccatgggtaacaactcatgatgactgcatcactgaagtccccaaccctggtcaacctttcatttcctatgcactcataacacaaacacacacacacacacacacacacacacacacacacacacacacacacacacactctagaacataatccagaccaggcaaactaggaagggattacctgtagctggatagggacagaaaggagaaagtggctaagatgatgactcctcacccccatatgagggaattttgttttgttttgttctggggttttattgatgttctttaggttgttttgttttgtataatataaggtctcatgtacccttgagctcactttgtagttgaggataactttgaactcctgacccccatgcctttacctcctaagtgctgtgatttcgggcatgcttcacaatccctggctatgaggaactgttgatagcccttgtctccttagagtctcttgtgggtaagcacagatactgatttcggtccagcactggtcctgtcatgcccagaagacagagttccactcctctcagatagccgagaaagcattttgtctgggtgtgtctgtgtgaggatgttttgggaagcgattaacgcttgcatcagcaggctgagtggagcaggtccaggcttagcaacctgagcagcagcacccaaacagctgagcggcaaagaaaacttaaacagagaaagagcaaagcttctctttcttttgtggtaaggacatacatcttctcatgcccccgaatatcagaactctaagttcttgggcttcttacaccagtgactcccaggtcatcaggtccttggcatcagattaaattattaatatattggcagctttcctgtttcaccagcttacaagcagcatacaatagggcttctttacctcaattttgtgtaccagttcccatgctaactcttgaatgtatgtatgtatacatgcatgcatgcttgggcgtgcatgtgcatatatgtcctcatctatcagtacatctagggtcctgaatgcagagagattagctttctagttgagtaatgtgaaacttagtctacaaacactacgtaatatggatgcaactatatataaatataaaatgaaaacaaagacaccttatgtgttacaagagtttaaacttgaaaggcatttgggagcctttcctcatttgctgattggcttcctgtatatctcatgagaattctggtggaaggtactgtccctcttcctagatcccttggtcctgtgtccactccaacctctatacgccttgctcctgactttgcccatctttgccctcctcagagctttgaacatggcttctgaacagaacttatccatctagaaagttgaagacccaggagtccccctcaacacatacactaacctctcccaccaatgcccgactccagttgtaggaggggacatctgacactcactaagttcagtttctacacagtgggccccaccagatcacggggacattctggctgtccccaaatgccataccattacttgcttctaactcctctcatccttccttccatttctgaggcagggccttcaggaaacacttccctaaggactcgcatgcattctgttttgggtttaaggtctgcatctcagaaaactcatcaaagtcattcaccttccacacgtgaggctttgcgactaagcaggttatatttaggaatacataagcctttacatatccgcacatgataacaattaatggaaaaagaggtcatgagtttgaaagagcataaggagggggtagatgtgagagtttggagggagaaatagggagacagaaatggcatgattattttataagctttcaaataatagaaaaaatgttttttaaaacgagttgactgcactgtggtggactgcatggttctctaaagaaatgtatatgtcagacacataggagggaagggatgggccactcagttccgggcaatgagagcaggttatatgtttgtctgtccggggccgtgaatccagagtcacacgcatgctagttaggcactccactactttcctgaattgtttttgcatagtcagtatagttttataaagcgctctactgtttataaaggtgtgggtgggtaggatgcagagatagtgactgtatactgaaagatcaatgggagcctaggtctggtggtgcatgttataatcccaacattcagaaggctgaggaaggagaattgtgagtttgaggcccacctgggcaatttagtaagaccttgtctaaaaataaatcataacatatgtaagtatccagcgattcatgacttggatatcttccagaccacagatggtttagtgctgcatagggagaatgaaaaactaaacttttacaaggtgtctccaaatcatgacagtgaaaatatggttgatgagaaaagtctctagttgagtgagttggatttttttttctttactgtttacaatatgtctgaattcattttgcttgcataggagccaaggcaatcatcaatgattttaatgagtgttctttcttacacagctggcatggagcacgcaggcactccagggcatacatgtgctgagaaggtaggccatgtgtgctacagagagaaccactgaggcgctcagcaggaataccctgagtctgctgcacaaagcagaatgctcacaagccatgtgctgtgtttctaattctgcagcgggttagaatgcagacaggactgaggagggcttcagagaccagcgacttggcaagcaagtgagagagaaagagaaaccaaggtaggaatgggactctaatccttacagactgcagacagttcagaggcagccccttagctgggtaggaaatgagagaaccacactcagaccttggctgcctgtctctgtacttcattggttttatgtaagagtgggaggcagtttttattttatttatttgtttgtttgtttattattttgttcttctagggtttttgtttttgttttgtttttgagacagggttttttctgtgttgccctggctgtcctggaactggaattcacagagatccacctgcctctgcctcctgagtgctgggaatgacataccaagttgcagtaagatgaggcacataccctcacattaaggctggaaaaggcaaccaacccagtataagggaaaaggtaccaaaggccagcaaaagagtcagagacagcccctgttcacactgttaggagtcccacaagaggaccaagctacacaactgtaacatataagtagagggtctagatcaatctagatctagactgataattctacagatactaagtaccagaccccaggctatacagttacaagattgtgtgacactattcaccagtacagcatcatcaccagggctctgtggttccaagagaagggagggcacctgtcaaggtggatagcaggctccctggttcagtctctgtgaacccctatgagcccggttagttggttttgtggattttctttgcaacatccttgacctctctcctacaatccttcctccccttcttctgaaggattccctgagctccacctaatgtttggctctgggtctctgtatctgctcccatcagttgccgggggaagcctctctggtgatgattgagctaggaaccaatctatgagtatagcagaatatcattagaaatcatttcactcttgtttatttatttatttatttatttatttgtcaggcttttatggttctattctaggtctctgggctacccagcctccggattctgacctccaggcagtatcaggggtgaggagccagttcctaaaagtctgagtttttgaaaaacaaaacggttaatctcagcccttgtactctttttacaaaagaaaggaaaaatggattgtttttaaagtgtccgtcttgcctagtagagtagacctgttagcccagcattacaggctctttctcacaaactcagagcctatctgtgtgccacagggagacccctgtctcaagcaacaacaatgaaacaacaaaaactaatttttttccttcgtcattggtgatagttaacatttggggaacaccagaagtggggtaccatgctaaccacttcacatattcaccatccctcctcacggcaatcctttagtgaaacaaacagaattatcttcattttacagagagagaaagtgataggtgacatctgctgcatggtcagtacaccacagactctaagtcagaactagacagcctggactttgatatttatctcctgtctgcaaaacctaccccacgtggtagtgacgtttcagtaaaactcaggcctggggtatgagaccccaccctaaggtacagggagactgaagaaaaggaatcagttccaggatcttaaagatggcaatttatcaagaaacttactgacaaaaatcatggccctggaagacagcaagaccaagtggatccacacttggggcaaaaggaagggttgggatgaaagtgactcaccttagctggaatggacctggcctatttttttttttttacattttcttgttttttattgaattacctcatgattccagttcccttctccctcctttcctcctctgccactctcccaactaaaatcctacctatcatatgtcctttcttctaatctacacctgactcaaaatttctgctatatcatgacctcagcatccttccttttcttcccttctcactctcatagcttcctcccccctcttcccatgttctcaatttgctcaggggatggtgaccctttccccttctccaggggacagtttgtctcttttagggtcttccttgtttactagtatctctggcagtgtggattgtaggatggtaatcccttactctatgtctaagatccatatatgagtgagtacatatcatgtttgtctttttgtgattgggttaccacgctcagaatggtttcttcaagtttcatccattttcctgcaaatttcaagattccattgtttttttctgctgagtagtactccattgtgtaaatgtaccacattttctctatccattcttcggttgaggggcatctaggctgcgtccagtttctggctattacaaataatgctgctatgaacatgtttgaacagatgtccttgttgtatgaatatgcttcttttgggtatatgcctaggagtggaattgctggcttttgtggtagactcattcccattttcttgaagagtcgccatactgatttccaaagtggctgtacaagttggcactcccaccagcagtggaggagtgttcctctttctccacatcctctccagcataaactgtcattggtgtttttgattttagccattatgacaggacctggcctatcttaatatattcttaaaaagcatattcctggtaccagggtctggctaaagagatccacattctgctcttatggtttgtttggttgcttgggcttttttgttgttatttgtctgtttgtttgtttgcttacagtttgatggaaaactacataggaaaaactgaccagtgtaatttaggcaataatgatggaaagatggttcctgtcctgtcaatctgaatccatgggagtggtccagggaccataacatctgcgctctgtagctgtccttttatccacaggcattttctttttcttttttccaactttttttgaattaggaacaggattgttttacatgacaatcccatttcccttctcccacccgtcctcccctaccccccccccactaaaaccttatctatcacatatcttctctgctccccctggatggtgaggccttccatagggtgtcatcagagtcttatgtttcctttgggttagggcctatgcccacccccgtgtgtcttggctcagggagtattcctctatatggactgggctcccaaagtccacacctatgctagggataaatattgggcttctacaggaggtcctatcgatttccgaggtttcctagcagaaacccatgttccttgggtctggatcagtcccatgctggtattccagctatctgcatctgggttccagttcagatcggtgattagttatgggtgtctgcttctacttccaccagctgctggatgagggctatcaggtggcatataagtctgtcatcaatctcattatcaggagagggcatttgaggtagcctctcctccattgctgagatagttagctggtgtcatctttgtagatctccagacatttccctagtgcctgatttctctgtaaaccaaaagtgtctccctctattatgatatctccattcttgttatcatgtattcttcccctgactcatattttctgctccctcatgtcctcggcatccctcttcctctctccttctcatcctcctagctccctcccccctcttcccgtgctcccaatttgctcagcagatcttgagcctctccccttctccaggggaccatgtatgtctctcttagggatctccatgtttattagcttcattggcagtgtccacaggcattttctgagaactgagacaccacacttctgaaactagctaattatgagcattttcaatgtcacgggataattaatgtatttattttcaatgtatttatttttaaaagatacagaagcttgacatagtggtgtgggtctacaattctagcactcaaaaggcagatacaaaaggatcatagatttgagggtagcatggcatacatagcaactttcagcctggcatacgtagcaacttccaggctagcctaattatcatgaggtcctgtctcaaaaaccaaaaacccaaacaaagacacaatttagccatcttagaagaacaaacaaaaattggttttattctgcttgtagaagtctttgaaggagaaaaacattcgaaaactatcacagaggtgattccgtgtttagctgtggctcctgcaggcccagtttgtctcttttggctttatagtcagtaagctcagaaatttccaagctcaaaaatgcaaaagccttctcctgccctccagaagagggctccagagtccccagcccaagactcaacccgatgaaacacagctcgaccactagagggagacagtgaggccctcatgcttcagcaagatttcaaatttgtatttgtttatagtcatccttttaaagatgctttcacctaagagctgggctttataccgagtgcatggtgcctgtgaaaatgtgccctccaaacccaggaggcacactgcagctcagcacttccatctcaataggctctagctgacatctgcttacctcatacaaatattactttctccttttcagtccgttcataacatttttgaaaaatatatggtctactaaagtcagccacgcctcaagaatgtttcggaccatgcaaaatatctgcttcccatttactcttcatgtagtggcagttaatacagtacatacaggtggcaggaaggcttaccctgggctgcaagtcattttattgtcatttaatagagtcacacagtcctgtgctatctcatctgcatagcgcagattcacagtcttcccaaggttcccccagcccctttgccgtccgtcatcctgcactgctctagcctctgctggggtgatcatcgactactcttgctacaagattgcccgttccagaacatcagatgagtggactcacatttgtaacacttttataactgctttcacccaagatgatgcatctcagatgaaccaactggctgatccgaatcagctgacccaatggtcaggactttatttttactgctgagtgctaacccattgaagagctgcatcgtcatttgcttctcagctcctccagcaaaagggacgctgttaaatgcccacaggtgactctgatgtgccgtctgttggaaatcactcagtttgataaactgctcaggggtctaattaaggttgttaggtttctttctttgctgccccgtcaccccattctcgtctttatcaaatcttgctatctaagaagctcccatggtcttatcaaacaactcagggtctactatttcccagtgaactcagactctcctctcaacagccaccctatctgaaacagtcatacgtccacacaccaggcaccagtgttcccattgctcattcgtgcccactcatcgagatgcatactttcacacccgggttctcataaaattcctcttggatttctgagaggacaagtcagtagataatgttaatgcttaaatggacaaatagaattaactctttggtggtgtactagttggaattttccagagaaggagacaatagtgtgtatgtgattcctgtcatataaacacacacatacacacacacacacacacacacacacacacacacacatatatatatatatatatatatcacacatatacatacatacacacgtctatataatggtaggtactggttcatacaattaatggaggcagagaagttgttacaagctgaagaacaagggaaaatgataggggaagtgcagtctgagcctagagccttgcaaatggtggttgtgagtggcccttggtataagtcccggggtcaatctgaaccaggaaccctgctgtccaagggcagaggcagacagggggtggtcttagctccagcctaaagcaagtttgcatactttgctgttttgctgtgttcaggcccagatggattggctgatgcccgttcacatgggaacacgagccatggaatatttgtgcagtgtagtctcatatgctaaccactgaaaaatctcagaagcatgatgttgagcaaacaagaatagttttcagaaatagatatagtttgacacgttttacctaaagttctcaagacagaccactactttgtatatcactgaggtagaaaatagcccattgcaaggcatacaaagaactcattgcagacaatcagttcacgattgcagggattccttctgggcaggtactggtcctctcacataccactgggatatacccctagcctgaagctttttgttgattttttaaaatagtgattgatatagcactgcaaaaaaccaagaagttaagcttccatggagggtttgttttgttttgtttttgccaggaaaaaaaaaaagctactaatgattgctaggcagcttggcttggcttgtttataaaataaatcttaagattgtttataatatttaacccaggatttaatctaaagatgtaaaaatgagtgtaagttcagcactgctataataagaagacatggcaagaactgtgtctgctgggcatggtggcttacacctaggacactgaggcaggaggactactatgagtttgtggtcaatctggatcatagagtgagctctaggctcagtctcaaaaaaaaaaaatcattaaggaaaaaagaaaggaactgaacattaaaaagtagaagcaatttcatgatttgtgatgcttaagcaaaatgaataatacaaggccatgtaaagtgcacagacaaaagtctacagatgagcagtgctgtgcaagaagatgcttttcattgcaaggggcaggagaaacacataagtaacacagataacaaagctgctgtctcaccatttgccaagatgcccagctttgccatggctacaaggtctatgtcataaatttaaggagcagtcctgggtccaacaggctttcagctgctcacccttccttcaggctacgtcctcttgcctcagcaattcgaggtgactaacgttgcttcagacacacccacctaatgtccacaggagaagtctctctctctctctctctctctctctctctctctctctctctctctctccttctgtctccctccactgccccatctttataaagagaagtgaatacagatagagtctgaaaaatggaacttttgaaaatgcttgtctccagtggatggcattatgggaagtatttttcttatatttttgcacatttaaaaaaacatatcggacactgtctaattttcttcaatgaatatatagcatattctaattcctccaaatatatttaaataaaaattttaaataaaaaattaggagctggagagaaagctcagtagtcaagaacactggcttttctttcagggaatccacatggtggctcacaagtatctgtatctgtagttccagggattctgacagcctcttctgacctcctcaggcaacacacacattcatgcaagcaaaatacccatacacacaaaaaaatctaaaatattaaatgaaacatttataactcacctaagcctttttttctttgcaagttgcttctgtacagaacacatataaacatttaaaattttattttctttatatgtgtgtgggtgttttgccttcatgtatgtatgtatgaactctatacactcacagtgcccaaggaggccagaagagagcattgtgagccaccatgtaggtgctgggaactgaacctgggccctctgcaagaacagccaatattcttaaccactgagctatctccccacccttttaagtgaataatttttttcaaagacagttgtgtaagataaaagcaaggagattcacccgaggttgtaccctgaatggcgcagcctccaaattcacagtgcttcttctcccagcatgacccagggctttcagaggccccagacattgcagcagtgctgcctaggtggcccccatcaggcctggagactgtgccttggccctcctcccaaaagcagagggttgcctggtacaaaccaggtactatgccagacctaggtgcctaggggcaagagaacaacatagatttgtctgtggagcaaggtgacccaaagttgcttggacctgccacaagcaggaagacgctggtggaggaaggaaaacaggaagcatcagaagggacagctgaagagcagagtgagctaactctaccctaaaccacagtcagcaccaagcatttgcacacattctatagcctctttggaatagaactctgccatgatgttctctgtcacttcccagtggttcctggatgccaagggacaagggaaacccaggtagcagaaaggaaatttgattcccagtccctcaaacctcggcttcactgaaccccagctgtactggtgctttgcatggagctcctagctcctctcccttcccaggtctctcccacagcaagcagtgcccttgaaacaggacactcaggggaagagactccagcttcagaggtacacaagcctcagttccaggtagacaccatcagctcttgcctgtgcgaagatgagcaagagcaatctttgcctcgccacccttccatttcttcacctgtaaaacgcaaatgtgctggaagagtcccaaatgagccgtgcatgcagattgccaacacctgagtgaggaaacccacagaagcacaggcagccactaggaagcagccggcacttcaccttcaactctgcagacattaatcaagagctgccggctgtcagccccacttcctgaggtggctttagcagaggcagatcactggagctggctctggtctgaaaacaacaaaacaaagccgggttctttgaaaattagtcccagctaacttcacttgctcacagcctggagctgggcaagtgagctctgactccagggaagaacaaactgtgcctgaggggcctgctggagaaagttaagaatgaatctccccaatggcccacagtgtgagcgctgagctaagagaacataggagcaagaaagaaaatagagcaaaaggaaaacccagtgtttgtcctgccttgggagcagcttctttgatctatgtagaaaactctttgctgcccctagctggggagcacagctcctgaggcccaaatgaagcaggggatgaattatcttcaaagaaaactaccgacctttccaaatggtccatcagttccacacaggcaaggggcatgcagagggctctttagtggaaggacttcctagcggaggagctgaatatcaaatttgggcttaataactactaaagatgtcccaaaggagaatacggaaagtgtcaccatcatagttattcttcccaagtgtgtagaagggaaagtgtgttttgcacaaagtttgctgggcccttgaaaaggcaccatgacacaaggtgcctacttcaccgttgcctttgtactcggttttgtgcgtgtgcgtgtgcgtgtgcgtgtgtgttttgttgtgagttgggggtgggggttaaaacctaagatgtttttgttgtgttaacacatctaagggaaagaatgtgtctgtaaaattggagagtggtctttttcagggtattttacaagtttgcattttgaaaatagtgcagtagccggtgaattcggggcttatcttgcaaatggagaagctgagacccagagaggtgaagggatccacccaggggacgaactactgctacttgatctgtggctggaacccagggttgagcggaaatgtttgcacatttattagattttaaacagtagccaaagttgtcaaagtaatattcaaaaaagagcatgtgtgcatacacaggctcgaacatacacatatctatacaacccccccccacacacacacaaacacacacactccagtatcactgctgagtttatagcagaattgggtcttgtttcctgaatacagaccttgttagacctacttgtaattctgtttcctgtttcctctgacatgttcccttatattttctaatgctctactgatatttgacttcttgtttcatcaattttaggtatgtttagtctgctggtttttctgatgttcaaagtgaatatttagcacttccctgactttgcctttcctgtcctatctgtaattgacagttaaaaaaagaaaacctggttaaatcagtaacagctaagtcattacatcacaaacgtacttctatataagtcaagtggtatgtcagataggattgaatttcctttcccagttcctgctcctcctgggattaacaacagtgttagttttttctttgctgtccacacgtcaacagtgattgttctcaaactctccaacaagatgtgctgcccctgttagcacaaccctctacttccatcaggtctcatgatgagcctggttctgtctcccttggagcgccactcctctgccccaatggcccactaggctgtgccccacaaggagcccttccttgttatttcctctacctttggcaggattcatccatatcttagaccccacatctttttctgccatgtattactcattggtcttaatggagtatggcctaagaagtgagtcagaggcttaaaatattatgaagctggttgtgttctgtgtgcctgcttagtagacagtggctggatgtagacttttctctttaattgataaagaaatacagacttcccctcattattatttagccattgactcttagtcactagtatccaaggtcacttttccgaaacctggtaccactatgactcctggttcctttgcttgtttaaatacagtgtttctaggatgtgtcctttatccttttgtgttggaaatgttctaaacatccactaagtatttgatggactcaaagctttatatgcaattatcttgtcatttgttaatatggagcggaaattgctttttctcttttcaaaaaggaaaagtaagtgatctagttcatgcataggacttcttgttgtgggtcttgtgacaactctccaaacctcacaaacatagctcatacttgttacacatttctcctattcacggcctcttggggccctggctctgcagagtctaactcattctaactcaggactttgtgctcagcacagaggtatagggaaacgtggagaataagacacagactggctgtttttaattggaaatacgaatggaaatctagaaaactgggatgaatttgagtctaaatgtgacagagggcttctggggtcacatttaacagtgtctacactcaggaaagaaagtgaggagaaagcctgaaaagggggagctgcaaagagaaagattgcccagatgaggcccaaggagcagaagcatgaacttaagcttctcgtagtctccattcaaatgatgaagttgtggtcttggtcaggttgctgaagtacccaggccttagttttctcatttgcaaaatgggaacagttaccttgaagattattttcttagctaaaggtctttacagctgcttcaaatagaaacggaaattttcagaaatgtctggaagcctgtgcatgctggaaatgggtaaagtggcatcagacgaacagatgttttaataggaaagtactcacacaaccagtcagtcctctaaaccaggcgaaccatggaacagagagagagagacgcctgcgtgcgaccctcatatttcaggtcttgctatatcactgactacaccctagtgtgcctggtctgcatcatctgtaccagcccccaagagggcgtggctaacatttcccctacagatgggatgcatgatcacttccagagacctccaatattctggagaactttccaacatgtattgccatattgattctgggagagctcaaagtggtgacaggcatgagagtatgctatgggcaagtagggcctgcagggtggtgggcagcagcctggagctcatgcaggctctgccatgaacacactgcccagtcacatgaatgtcctggctctgagaaatggtaggttgcctgagatgaaaaacggttcattttctggatttggcctccgagagaccgccatggtccttgctgccatcacaggccatgttgatggccatagtccatgatgctgcccaaagccatgctggtgtctgtggtctgtgctagcactgggggccatgttggtgttcatagtccatgttgtcaccagaagccatgttaatgtccttagtaagtgctgccaccagggaatatgttgagtttcatgttctgtgctgccaccagaggctgtgtggatggccatggtacatggtttgtgctgacaccagaatccacatggaaatctgtgatccatgctgctactggctgttatgggcaaggaagcttcttttacagtggtatcaatgactgcagattcgtagttgagaatgagagacattaaagaattctgagacaaccccctccccaaagaaacagtctggtcaggaagccatggaagagcccttaaaaattgtgccagggatgctgaagtgtacctctttatggtcaatggcttctagcggggaaaggaggtaggaaccatggcaagttgaggcatatggcaagactgtttaaaatggagtttgaagggatggtgagatggttccatttgtaaagtgcttgctatacaagcatgaggacccaagtttgattcccagtactcacatataaagccaagtacatgcctacagttccaatgatggggaggtagagacaggaggacccctggggctagctcagtagtcagtgcaactaaatcaacacatggcctacacacacacacacacacacacacacacacacacacacacacacacacacacactgaataattttaaaatattaaatggagtttgactctgagggaaagaatagttgaatcttcatagttgtttttgcttcattcaatatgaaagatttctgttagtgtgtttgtcctgaaaccatggctatggcaaacagtaaaggaaggtgtctgtcctgcatgcagaaagaatataccaatgagggctggagagatcagcagttgagagcactgatgctctcccagaagactggggctcattacagcatgcacacgatggagactcacagccttctgtagctccagtggcaagggatctgacacctcctcttggtctctgtgagcagcaggcacacacatggtacacagatacacatgcaggcaaacactcaaacacattaaaataaaataattaaaaataaatatatctaatgtgatatatatagatttcttcttcctcttccttttcctcttcttcttccttcttctttcttcttcctcttcttccttctttcttccttttcctaacaaatgtgaactttccccattcctcaagcctgttgcagagaggtggtgcgccctctggtggtgtatatttttaaatggttccatctgccccaagagcaacagttctgttagaatcctatctgaaaatattgcccacaatttgggggcattttctgaatacggcaagtcagagtgatttccaggagtttttaaggtattactgctcctcgtgtccacatgtgctatttttttttttagttcaaattaggaacaagcttgcttcacgtcaatcccttctccctctgcctcccctcccccacaaccctcctcccaaccccccacctacctcccaccctataacccctccactccccaggcagggtagggccctcgacggaggctctccaaagtccaccacatcatcctgggccgggcctaggccctcccccatgtgtccaggccaagagagcatcccttcatgtgggatgggctctcaaagtcccttcttacaccagggaaaaatactgatccttaccaggggctccatagagtgcagaggcctcctcattgacatctatgttcaggggtctggatcagtcctgtgctggcctcccagacagcagtctggggtccatgtgctcccccttgttcaggccagctgtttctgtgggtttcaccagcctggtaccgaccactttgatcttcattcctccttctctgcaactgggttccagagttcagttcagtgtatatatgtgggtgtctgcctctgcttccatcagctactggatgagggctctaggatggcataaaaagtagtcatcagtctcattataggggaaggacatttcctctctaccattgcctagattgtcagttggtgtcatccttgtagatctctggaaatctctctagtgctatttttaaggacatattctgaatatgtgactcacctttatctatctggcttgaaacgaggccaggaagaggaggcagcatgaagtgggcaaaaaagtatttctggttacagtggcacagaagcacccattgtcctgtcactgagctaaaacaccaaccaaaagcaactagtcatagttagagagtcaggaaaggaagtagttgagtatgtttctttggctttttggctccagcagatgaacgcacaggggtagtgtttattggtttgaactctactgggagtaaggatttgtgggagttgtgaagagtccagtttgtgacattcttgttctagatgaacgagtgtgtcctccaagtggagaagccaggctgtgagctcgctgactccatctgaggttccttgtaaggatgtgtgtctcccagctggatcttgaatttggagatggtgctggcagggactttcattcatggctgccatgtactggcctaaatggtttgtctggggcatatcttttgatgttagatgaggaataatacatggaacaaacaataatgcagtgttccctttccagaaaacatctctgcaccatgctaatattatccttgatgcaaaggccatcaatgcatgttgagccagattttttttttaataagcaaactatttatttgttaggtgcttgctccagaatcacttatcacaacacaagtagaagttttagagtgaagagggcaagatggcaccagtatcttctatagattattattcaagggaaagattcccttgaagtagagagctcacctcacaatcggttagcatccccactagtgaggcacagtggcatacgttgctccctatgtactatactgggggggggggtcagttggtacatattaggatctcagcagacagaaacactgagcaactccccctgagggaatgccagcaacgtgctaccccaactgcttcaaatgtaacatcttcaaagacttgggcagacaccagaagtagatggcgaaacctattgccagagtcactgtatgcctcaggtgagaacacagaaatccagccggagctgaactggaagttctttgttggcaagtgtccatagaaagtactatgtaggctgctgggaggaaaaagtcaccaacagcctttctcagctgtggacattgtagctacaattctggctcgcctagcaaggtaagcccaggggttcaatagtggaaagaatgtctgggggttaagtaaccactatgcagttggatttgagatctgctctgtgggaggggcttcacttctaggtctgtaaaacttggtcaaagcctgtgactggaagggtcacagacctgaggaatatactaccaatgtattgctaaatgcagccaaaattgcctcctgaacacatccatgagcttacacccatagatagtgctgctgtagaccttggccagagaagtgtcttgtttttgcagagagcaatagttaatgcaaaaatgtcataattagtgaaagggccaagaataggtggcattgggtgcccagccctaaacatgacatctatatcacctccatcccagggtcagggaatatgacagaagagggagaggaaagatagtgaaagtcagagcagggagagaagcgctgtgaaacactgcctttctgggtgtggcatgctgtcataatcatgagcacatagcaactacagctaatggcacaagacctacacccccacaaaatgacacaggggttgggggagcactggtcggaaggaagacagaaaccatcaagagggggaggtgggtgagagagggcactggggttggatatgatcacaacatgtttggcatgtgcatggatttgtcaaaagtaaaagacatgattgacaagttgttcctgaagtagaagagactgaggaaacagggtgactaagtagaaatacaggactccagtgcaaggacagctttgggaagactggtagaacttggatatgtccagtggtaggcttatatctgtagactgaagtttctgtcctgcctggtcccacagttgtttagtcacaaataaacccccagaggctaatattaattataaactgttggccaatgactcaggcttcttactggctagctctctcttaattattaacccatttctattaatctgtatatctccacatggtcttggcttaccagagaatgcccagatgtcctaacttcccggcagctacatggtgtctctctggcaactcactctctgtgtttctcttcccaacattctcccagtctggtagccctgcctgtacttcctgcctggctacatcctgcctgtccacaggccgaaacagctttattcatcagccaataagagaaacatatattcacagcatacaaaaggacattcccccatcacatatcagtgttagatcactgaatgtagtcactgcactgtgtcctttgttctgagggaacactttctgtacttgggtcctgacatctgtagtttagctcctgtagcgtcaagcaataatggaactgctagtaacctacacatatatacataaatatgttaaatgtgtttattgataagtatacacaaaagtatatagacattcatgcactttgtgactttctgggttttatatatgtaataattatatgtacatatattgaaactaaaaggaaaggtgcagctatccaacctgcacacaagcggacgagtgtctaaacactgaagacctatccactgttcctttctgaaggccagatattgcaatattatcttttctagtctctaaatcccatcttgatgaaatgtcaaataggaaccaggcaaaggtctaaccccctgctctgacaggctcttaggaatgtatggtattggctgtaaatccaaaacttgcgatatttagagagggattcatttcttttaaatccaggtacccaagtagaaagctgcctccaggcattcctgtccccttgccaggtgacagtgagcagcttccatggccagctgctcttcagagaggaactggagtcccaggcacactcgagttcacaaggtaccacctgcaacctttacaggtcccagttgtccacgtgtcagaagccaggcagtcagaacagtgcgatgggccaaggaagtgtccattccagctctacctgccacaccaactggggcttcactgtctacaacttcctacctggctggttcaatagcctctgcctgaacacattggtggctaaaactcatcagccagctgatctggctctgaagagcagaagcaacaggagcaccttgtcttgtcagaccaggcaacagaagaaaatctgtttccttttctccaggaatctagtacacttttaatggaaaattgtcaaagcaggtcaaaggcagaggcatgtgtctgtagttatagataaccagctaagttatctttcctctctatttttaatgtttgtacatataattattttattatgatccagaaactcacaaagagattaatacctatatactttcgtgtagacttatcaatagataagttaggggctcaccaatgcacagcagtctaggctagcctggacaacatagcaaagtctgttttacacacacacacacacacacacacacacacacacacacacacacacacacagacacttccaaagcaaaattaagtttaattaagaacagtgagtaaaacattgcaggacttcagcagggtgtctctttatagccatcatttagaagtcatatttacatttgaagggccctgtgtttatcaccttctgatatatgccctttttatattttttaaaaaataaagctgcaaggcacacacattatgcatctctgtgtgcacagattttgtgtgtacctagacagtatcaaaaggtaaatgtcaagggtatccctacagactaggacatggtaagggggctgactaaggaggcatctgtttctcaccttaaacattttgttaatgtttgaatcttttttagaaaacaccaatacttaaaatatttctctaccaggcatggtggtccatacctttaatcccagatgcctaaattaagaactgccccgaggcactcctgtcttctagccatgttacagtgggctcctgtttcctaaccatgtcacagcaggcaacttcctgccaatgcacctggtgttagatgcaagagtcacacagaggttcctgtgcactcagaagactgaggcaagcaaatctctgcatttgagacagcctggtccacatagagagttccaggctagtcagagctatagagtgagactctgcctcaaacaaattgaacaaaagacagaagacatagagagtgaattaaaatccgagtggactgtactgtgggtagcctaggagaagcctgttcctgttcccaacaagaagtcactatcccgtgccagcccttcagttccccatgtatttctcccagctaaatatttccatttccttctactgtctagttggcagggtgtcaaggcatcatacattaaaaataaaagggaaggagtagctatctgatgtacacacaagcagaggagtgcctaagcactaaagacatatccattgtccctttcttaagatattgcaatattattttttctagtctctaaatcccatcttgatgaaatgtcaaaataagaaacaggcaaaagcctaaccccctgctgttgacatcctacctctctccactgaggctgagtgggtctgagtccaacagaaagcaacagtgacaaccaatcgtgttgaatggtcataaacacatggttgcttgggttcatacagtgtcttgcccagaatttgggggtgctctattcaaggtctttgtcaggaatgggcaaaggcaggccagcaggctgtccactggacccttgtcagaactttggatgggctctcacagcatttgacaaatctgactgactaataagtgatcacccagggcaagaatgacaagggcagttacatgatatcctaatgggaaaacctgtgtcatggtttgaagattctagttctctatttatagctaaggtgactgcttctcctcacttactaatcacatcctttgtccttgtgtacttaataaaatcccctttattcttcagggtcctcctgttgagatgacacgggatatcattatcattaggagttacgtttctcattgctgtcacagagaccttagagatgcagtgtgaaggaggagaggttgattgtgactcagtttagaggggacagtcagtcatggtggggaaggcatggtgcttgcaatggctccatctgtggcagtgggaatttgtgcctaggctccttcgtatcttagcagatcaggaagcagatagctcaggcctgaaacattgctggtctataaccctcgagaccacccccagctgtgtcatccagctctgccctgtatcccaaaggatctacacctcctaaagcagtattcctggcagggttctaagggctttaaacccagcagcctgtggtggacatttaccatccatcgaacattatgaacccgttaggaatatcttcttcacacagagatgtgttcttagcatcccaagaagaacttactctagcttcagcagaatctaaggcacttctgagcatttcagaaccctaaatgccaaatttcagaaggcaaggcagccactaaaatgacttttcctctctgaaatcatctagccacctttgagatgatccccttcacactgggaagccaggtatttgattccttgagacagccgctgattcttgctgtgccctgaggtcaaagagaatagccatggcatatttttttcttttccatcctgtcgatatgcattttcctgaaactcctgccctgcctctcccactcgggaaacttcattctctaataactaggagaactgagggcaagagctttctagtgagtcagtaataactgaagtgataccaaagcggtcagaaacactaagaaatactactacctctgccatttggaactatttctctactctgtgactcggtttccccatatgtaagatggggctcgatagtagtcttccttagtgaagctaacagcaggtttaaatgagttggtaagtagcatctttgatattcaaacaattaaaaggaaacttgaccctgattctgtggctcctcctggagaggacagaggaaagaatataaacaagaacagatgtttggcagatttgaccactgcaggaggctctgtttaggcaacataatcaaagaacagagtgctgccatctgaggtatcccacccatcaccagtgacaggcaaccatcccttcatagatgcatgcgctggacacctgcctgccctgtgtcttctttgtcaacagaaactaaaatagaccagcttcgtcagcaccaggagcccaggagtgatttcagtggctgctactctgaatgcagttcaaaagcacagtgaccaaggaggaaataatgacactcttgactactgcctctctttcattcccatggggacccaaagtgtttctctgggcatgctactgaagagcattgcctacgatttcttctgccaggccatcactaatctttttttatttttgtttttcatgaagcagattgaataccttgaagagccagagatctttactagactggatctatagagaaaaatacaaattagaattgaacagagtcttttttttttaattttaagttcttctttcactttctttagctttccttccagtctaaatcaaatccttgtgagtttaatgaccttcacccaagactatatggggcatgcagtctgctctggatatggtgttgattctgccaaaggaaaaaggacattgatgctctaattactgatggaagacacggaaaaaacacctcttagctctgaacgtatttatcagtcttctcagcactgattgaaacctgccattcagcctttgcatagccaccaggagcattaaatggtgttgatgcaaggacttcaaacactgaactggaatttcgatcagattcttgaggctgccaagccagtgacatcagtgtgctatctgagtcatgtggcacacaacagacaatagtggtgaccgtacaaagacattcaaagtcaaatattaaaaaaaagaaaagtgattctgacagagtggaagaagctgtatttttgtgtccatctgctctgtgtttgaatgggctgtgcagccccacatacgttactaaatctctttaaggctaactttattcatctgtaaaataaacattatagtgtatgcctccagtcgtgaagattttagaacaatgaaaagccattatgagccattagttaatcagattcaatctccctgtatgaatagctggctcactttctcctcaggacagcaatgtttcctgtttattctttccaaggttctaggtttctaagtgtgtgagggagctagaaaggtagaaagaagcttcaaggccaggtagtcagggaggtctgccaatactctactttgttttgtggtgcctttgttttcacgctactctatacccaaagcttgtcatagaggcctactccaataggagacttccttatgacactcagaaatattaagacacatagcaacatatgctcatgattttcagaagccaatgacacatgaagcagaatatctacctacctacccacccacccacctacctacctacctacctacctacctgtgcatcatttcattaaggctagctaccagttcccaggtggaagcattgacatccctaagcccagccatcccacactctccatattagaatgtccaagaacactttatttgccttaaattttgaagaaaaaaatacaacaaaacaaccacactttcaagaagggaagggatgaaaacaagaaaaaactccctattctctaaatttgggaccaaactctaattcctgtttctgttatgaccacagggagtaaggaatacatggttctcctcatggttttctcatatgttccaatagtctgaagttttaggtctttcttccgccaggacatggtttgcatattttctctatgcatgaggccaggaaagaagcagcagtggagatgtgtgctgagtttctcatgctgtgacaaaattccttacagaaataactcattcaagtggtcattagggcccacactttcattggtcagtcattagggcccaacgcatgtcacagtgactggagcatgaggcagctgcttctggggctcacactttcaccacccattacagtggggttggcccagagcctggggcatgaggtcactgcttctgacattggggctgactggaagcagagtcagaccacaagcctcaaaatcccaccccggtgatgcaccaccacctgccagtctccacagctctaaaatagcatcaccagtggtcaaacacacagggctgtgggggtcatttcggggtcaaaccaaaaaagaatccatagtaaatactgcggccagcttcagcaaatggaatctgagttcaagacaaagtaaacacattgttaagatgcatatgctccttccacttggtcacaacatataattcatgggacatgagcaaatggctttatctgaaacctcgatttcattgaatatgcaatattttttagtctgtaaacctgagtctgaccccctagaagtacatgagacaagactctccacagtgttgaaagttgtgaggctgtggaggcatctttattcagggactaatctctgatctgcaagtgccaagctcagcatccccagggatggggagcatctgttagttctctgatattccagcaaccatcactttagcatattctgaagagactacaggaggaagcaggagaaaagcctctcctcccacgtgcctgagagatgctacaaggcttctagagctgggatatagcctaatcaaataagatgtaggaataacgtatcaagaaaacccagagctatgtacaacttgtattcacaaatggaagctatctgggggacagtttcttctccttccatgattttaaacatgaaaacactgaggcggttagtttgtctctggaatgagaaggaagtgtatatttctctgtgcatgtatacatagcatttctagtgagtgtgtttgacccagatgctaatatgccaatccagtgtcagatcttccttttacccacaaagtatatgcaaaagggaggctcattcatgggctaaaggagatttggaaatggaagattctggaatacccttatgctgagacagagcactagtgagtacagccattagttgccctcattaggtctggtcctgaggcttgtggggagtgtatgaaatcctgagtaaatgtgttattgacatggttgtagccatgccaaggaccccaattcctcagacccatggaaacgacaaagcctttccaggagagatgcaaagagatggcaaagcccccctctggtccaagtgtgaatggtgatgctgtatgcagaaactgtcaatcatggcttcctcttcagggatgactgcagcctgagactgctcccgaaaaagacctcctacccagattagctaacctgcctccttgttccactgggtaccatatacctacctacttctcatctcctctaatgagggaagtccttctgtgtatatgtttctcttatttgttgatgaatgaaatattgtggccaatagaggcagtgagataggcaggactaggagaggaggagtattctgggaagtgtaggcagagagcagtcaccatgcagtagaggaaggagtaacaggtctggaccttgttctggtaagataagaccacgtgaaaatacttagattaatagaaatgagttcataattaagacagggctagccaataagaagtcctagccaccggctaacagttttataattaatatagtgttgagtgtgtttatttggggcctaagggccacaagaccagctgggacaaagaacctcttgctacactcctcaattcagatatttaaaataaacatgtagagtttctcagttgctattggttgtagcgtgtctccatcagagtgcatggctcacccaatcctagcttttctgtacatatgtctgtgtgtctgtcctttcttcagtgcctcatcactgcaatcagatctccaggaccaagccatgcaggactttcagagcttcctgaggattaattctccacctttactttaaactctaccaaagaatatcaatgtggtgatggtcccattagcagcttctacacttacaccacttgtgagaggtagaatcccactaagaactagagtctattcctctcctttgcaccagatacctactggcttatttggccattaggtaggaaggggtgggggtcgcgtgtatgatgtaccagcttaaagccctaccttcaggaagcctgagatcttccagttgcctcaggacttgagcacatgataagaataagacaggctgaggctgtggaggatgagaacacttggaagagattctgaggcgtcagcctcccctcaccactaggactacccagtgggcagcagatggcctcagatacaggaagacaagcctgtgctaactgaactaaatgatgacttctttttaaagtacaaggtttggagttgttacacagcaatagctgacacttctacttccaataaattccttttcttggccagcaagatggctcagcaagtaaaagcacttgttgccaaactaaggaccagagtttaaaatacctggaacccacaaggtggaaaaggagaatagattctcacaagtggtcctctggcttccacatagacatacaaacttgcacataaataaatgaatgtataataaaaaatgcattttcttgtaaattcttaagactataaacaaaaacccccaattcacacatttcctgctcatctctcactcatttactagaatatgatgacaccatgtgtcatcttttgtcactatttcattttattttacaactgaatttgagcatcttcccctaacaataaattagatacagcaaagaaagaaaatctcccaaaatgatctatgacaccatggcccctggccaaatattatcctcaagttgaccttctgaactctgttcttctcaacagaaagtgtctcaggacatgttggatggcaaagagatttttcacaggacagagctgtgtcttggtgtgccattgttgacctttgtggagagagtaatgatcgtatccagaatgtcccttttccaagagtttaaagacatacagatggaaaagaaaaaaaataaacaaatattcctcattagtattttgctttctgacctaaattggggtagtttacaatctatagtactcttctccttggccatctcatttgccattcctactgtctttctcccagcctccaaatggtagctttgacctgagagagcacacatttgccagaattgggcaagggtgggggcaatgcttgctggataaccccaagccttatgctaatgaaaatacactaaacacaaatgtcttatggaagaatttttagacttactatctgctttggtccttttcagaaagatgcacaagtgacaatccattcttatcttgagtgctttccctcggggcttgtttgcttgtttgtttgtttgttttgtttctgataacacaacacagtcctctcattgaatgcttgcaagaattttgagttgaggcagtgctgtttttccttgggagcaagttgaagcttaaagaaacaagtctcagaggaccccatagctaagcagtaggtctgaggctctacttcaaagtccaaattcttcacctcaattgtatgattctagtcctcatagaattttaaacaaaatacacataccaaaagttacatcagtgaaatgatggttaagtattactttaatgtaaagcaaggcatggttttgatgagttttcttctagtcgtaagagggtgtgatgttgaaatcaacttggtttgtttctttgttcatttttccttccttccttcttccctttcttctttctttcctcctttctttctttctttctttctttctttctttctttctttctttctttcttttcatagtaagcaacttcctcaggctttcatgtgagccttaggggataggaaaacatgcagtgaataggatgacaggggactctgctatagaaccccattcaccaacttaaatgctgagtcagtagagacaatctttgcttttgtaagagagttggaaactcaggtctctgttatgttacctattaaatgctggcaacagtatttaattgggtatggtctacatgtttctcacacatgttgtcaatgccacttctcacatccagtttgcatataccctttcatctgggcatgagtttacctgccatagacccgccctgcctggcctgtacacctggatggctgagaaccttgaggaattctttcattgctatggatctgagctgtccaatagagacacggccacattagattacttatgtttaaattcattaaagtgagataaaaattcagttcctcagttacacattttaagtgttcagtaacacacatgtggtgagtggctacagtaggaacagtgcagctatagtgcatgcccatcagataaagagatatgggatacaggatgctctgtgctttagcattgacattccacggttcatgctctatgatacaagaactggaggctttgctttcacccagggtcacatctcttcaatctgccaaaaaaaaaaaaagtgaaggtgttgacctgaattagtggcagctcactgactgtggactgacattgggggaacctgcatgggaccaaactaaaccctctgaatgtaggtgccagttgtgtggcttgggcagtctgtggggccactggtagtggaactaagatttattaagtgcttgaactggctttttagagcccattctctttgaagggataccttgctcagactagatataggtggaaagggaaagccttggtcctgcttcaaagtgatgctccagacttcctgtactccccatgggaagccttaccctctctgaggaatggctatggggtgggatgggggtaggtggggagagcaggaggaagggaaagagtgagaactgggattggtatgtaaaatcagaaaagattgttttaaattttaaaataaaagaaaaaaaaaagaaaagtgaagctgtatctcagaaacacagccacagtttacttagtagtttgatttggggcttggcgggtatgttgctctggaggaatttgcaaccaactggtgggatttgaaagtattttctctgtaggaggcagatgtggaagtcttatctgttaagtttttttttttttaaacaaaactgagatattatttagtgccccaccccgacacatagctctggcacagccgtggaagagtgcagcatttactttcatggtggtgtaattatatacactaacctgttgtgtgctgtagtgagcatctgtccaaggccacaacacctgctcaaacacctgcccagcgtgtgaggacttagaggacagagtttaatgacttagttaaggccactcagggtcagctacccctgcctgaagacaacagagccttgtttaacctctggaggaagtacttttattgtttttggtgagatctgtaaagctgcctgaagcagagagagaaaaggagaaagggagaagctaaaaagcaattggttgtcagtgtttgtggcttgtttgctatcacagaggttgagaaagatacaacagcatgtagcaattcttcctgagcgcttacaaaacctttgacaaagtgtaatgcgccaatataagagaaaccagtgtaaacattcagtgtttggggatgggggaaacgaacagtggcattgtctctcaatgccctctatgttctcagaagagctatagctaaatgcttcattcccgtgcttgtggcagctcggtgctaataacatttgcctagcaggtgcaaggcttcaggttcaatcccccaataagaccccctaaacctaaatatatatttttatgttatcacatggcttctctttcatctccgtcataggatagagtataaatatttatgaatacttttgttacaattaatatgtgaaatatctacaaatactttacaagtgagggagatggctcttcaagaagttcagtggcttgggaagtgatgacaagtggactaatggcacatagttagaggtcacagggacacagctggagtcccacagtgatagtgatgagcagtgtgactttaggtaaactggataattttcttagactctaaaaagggtgggaaaggctaatatgtcaccttccttgcagagaatgaatcacataacatccagcatacaaagcatcctaaatcaaactttgccacctttctcctcaaagtctacacacagcaagggaacagaagtcatgctgctaactctggttggatcgttctactcatagaagtaggggcactgggtaggtgtcgagcatcacttaagcacaattaagattggtgttagtgctaacggtaagttctgattgaaagtgttccttttgatgttcgttttatcatgagtatgccaagacattggggggcagagggtggaacaatttgactttcaaactggcaaatgttagactccccctctttgctacacttgctgccttgagcaaaaggactgagaccaaacactagcatgcttccgtatgccaacatttgctgtgaggaaactgcacaatgatcacagctgattgatactgctcctgaagttgcagcccttagacaggactgttgctaatagtttgtactggacttcatgctggccccagtcttgctgaacctcagttgcctctgcaaccatttcagtgtgggccacttcccctggtgccctggcagagcagttgctacgactggaatgaaatgctgtatgattgtttcatacacaaactttgattggtaggaaaagtttgcagtgattggtgtgaacacctaagtgtagggggggaggggggaatgatgaccacgcccacttgagggctggcacaggtgatgctgaccatgcacacttggacatggtcagagtgatgtagcaaggctttaaatacaaggacgcatgtatgctgctctcttttccctctcccacttggctgtacaggactggctcgtcatgtgagtatttccttttttttgtttttttcaggctccatgcatctttgatttatttattgctattgagatgtgtgagtacttcctaataaaccatatgtttttcaaactagttctgactctattgtgattcgcattaattgcgttccacattacctaagagtctggattaattattttctgtgtcaccatgtcaaaaatacctgaaaaaaagcgatttgaagggagggtttcttttggctcacaattttaggatacagtgaatcatgacaaggcagctagtcacagtggacccacattcaggaaactgtgggcttccagaatgaatgaatgaatgaatgaatgaatgaatgaatgagcttggcttatctactccattttattcaatctgggaccccaacccatgaaatgttgccacctacatttcaagtgggtcttccccacttgataagcacacacacacacacacacacacacacaaatttgtcttctgcatgagtctagattgtgtcaagttgacagtcattattaaccactggttacaatgaaggctggtgggctcacttggagagctagcaatgagaaactcttgagctgcctctcatagtgttataacattaggtccctaaaaggcttctctttggaggtcctttttgttgttgtcatcgtccactttttaatagagtatgtggagctggtaacatgaagagcaaacagcaaacaacaaacagcaaggcagccagcaatgagttgcaaatccagtggaatgacctgatagttggtgaagaggcagagctgagtggtcgtccgggcaaacttcaatgctgctggctgcttgggcagctgtaaaggaagagcctctggaccagtggccagcagcagcagcagtgagggcagaacagctgcctcccaaagggtggaaactgtgtcaatggccatagtaacaaagggtggctgagcagttcaagagagtagagtgaaagggaagacaggggaatgaacgggaggggagagaggagaggccgaaggagggcaggaagatggaaagagctagggtattacttactttggctgttgctattaccatcgtactcgacaagaagcagcttgaggacagaaaggtttcttggggcgctcactttgaggagatcagtgcattatagcagggaaagcattgaggaagatggctccttggtggccagagtatgtgacagggatacctcaagtcacgtcttagtggaacaggaagcagacagagatgaatgctagtgtttagttcatttccttccttttcttcttataccccatggtgctacccacattcatggtggaccccacctcaccccctcagttaattctctctgaatgccctcacaattacacccagaagtgtgcctcagtctctcaggtctttggtaacccagtcaaggaggcaatgaagattaatcattaaaggtagtccctggtcactagaaggtcttggtctttagggccaagggtctcagatatcccagacttaggagctgtagcattggctgcagtcaagaattgaggaatcctaatgcctaggccctcccagaggctgcaacaccagctactgccaagggccgaggactccagttttataggtctatttaagagctgcaccatttgggagcctagtgtctcactagttgaggcctgcaagagacctgtagctgctcccacctgcctgctgacaccacctactttgatgaaagcccaataacacacaggtgccaaaggccagctcttgaagagcttctccacagtttctgtcagcatagagcaatggccccagcatgctgaccaggatcaaggctttcaggcaccaggttaaagcacctggacatggagagtgatagatgaaggagagtgtcagttctgcagcaggacaagccatttctttctgtccccagactatcccatatgaatcctttgcctccctcttaaatcccaaagaaaaatctgtgcattgagttaagaaacgttgctttttaataaagaaattcctcaaggcttctaagatgtggtggcaaagagaaagtagagcactgaattccattgttacagctctgtgtgttctttctctcactattacttttctcacacccggcccctcttctctccccttccactcttatcattggcctcattcttcgaaggccagctcatgtctcattagcctcttctggtcttccctttttttgggtgcaaaagaatgtatgttttcggtgcttaaatgtaattgatttccatttcataagggcttaatcttcactataatgatcgtgtactttctttgtcacagggtttgacattgtcatgaacccagaaggctctagatagataaaggccatgtctgagtccttgctgagaattgggctgactgcactgtctgtgagagacccatctggtagtcaaggccaaactgagaagttggaagaaaataagtcttaatctccactgtgttttataatgaggaggtatgacaggttatcagtatgtgtgtgtgtgtgtgtgtgtgtgtgtgtgtgtgtgtgtgtgtgtgtgtgtgtaggggcttgacaacaaaatggatcagagtcaacagactttatgagctgcttgccagccttaaaagggacaatgagagtaagcctcagggcagagtccgccatatactaggagcttagagttatctacagggatctcagagataagacaagcaattatttaaatggcaagatgaaacagcatctcagactcaagaactcacagggacacgttctagggagtggaacttctgtcaagttatcttgaggtatttggtgatgattgcctatgcccagtgtctatgcagggaagagggagagagtcagagctgaagcaaatagaaggaagctgcttctgggctgggaaagacactctggtgtcaaggccattattgtcatagcctgtctgagtcacaagggctgacagagctccaggtagtgaacctaagaggtttcatcctctgctaagaggagagtactgggacctctgagccatgatggactgtgtgattgaccccatgacaacatcaagtgtcccatgacggagggtaaacaggtggggtaaacaggtgggcatagttgacatcagagagtcggaactgtttgcctcatagcatcttgtgagatagtggactggctcatggaataatgtagttaactttggcatgggaagaaagggtcagctctcctagaaatgactttggtccacatatgatttaccaagggaaatcgatccaggagtcctgtagtcatgtgtctattggtttcagggtggctggttctggaagaaagaaatctcaggcactaagttatggctcctgtcccctttgcatttggtgtgtgtgtgtgtgtgtgtgtgtgtgtgtgtgtgtgtgtgtatgagagagagagagagagagagagagagagagagagagagaagtggcaataagagtatccacttcaaaggctcctattccaaatttaacccacattctgtgtggatgcagttggaacgcggagttggcacttgccaaaaggatctcagatggattctagaggttaaaggaggttacttacagtgctgagtgctgcttggctgggctgtgacctcggatgtgatcatcatctttgcctgagtgaagatgatggagtcaacagaagcacagaggaagctgcagggcaggcaggagagatggtctgaaccttgctcaggaaggcaataaggggcatgtgttaataacaatgagagccaggcagggaagggttcactcatgcctgcttcgccaggaattgtacttcaatgcatctcagcctccttaccttggaccagtgaggtggtgtgaccttgttttcatagtggaggtgccagaggcacagagaagttaggttcctgcctagagttacacaaccagcaagtttagacagagctgagtgcagactggcctgatcccaacgtctctgctctttctaccaagttgtcagccagtgtggttgtatgcatgtgaacacagagtattttctgaagccagggaaattccaaggggaacagcaagggtgctatatccaactgtccttcagtatagtcccagaaaaaaaatgaatgacctgcatggttaattattgaattagaagaagggctatctcccaaagacaatagtcatagaggtgatactgagatagcttcctaatgcgctgttcaaaggtccatgccgagccagtgctaggcacatttatcttgatggtgaagggagggtttgagacttctggacttccatgtgagagaacaaaaatcctttatgctgaggctcattgcagtcacatgtctagctctaggcattgaacttaatttcatttttttcttccattttttatttgaattagaaacaagattgttttacatgacaatcccagttccctctccatcccctcctcccctgccctcccccaaataacaccctacctatcccataccctttgtgctccccagggagggtgaggccttccatggggggggggtcttcagagtctgtcatatcctttgggatagggcctaggccttcccctgtatgtctaggctcaaagagtatccctctatgtggaatgggctttcaatgcccattcctatgctagggataagtattgatctactacaagaggccccatagatgtccgaggcctcctcactgacacccacattcatagggtctggaccagtcccatgctgatttcccagctatcagtctggggaccaagagctccccctttgaactttatttctaatctatctttgaaatcttgtctgatctctactgtgcaccacacacctcattctccaccctgtgctttcagtgtggccactcctgcctgcttacaggggtccaaacacaccgtgctgcttccctacacaggacctctgtggcctcttccctctgtagcatttcctccccagcacctcctcctccaatctagcccaacccatctttacctacccaccccccatcttgcagttgcagaacttacatctttcctttgtcacccctccccccaatctaagaaagtttcctttgctgagtgggatcatgaaactgggctcttttgcttcaagaatgcttctctagatttaagagttaggtacacatttatgaaaacaaaaaatatctcctctactagcaatgaatttcatggatggatggatagatggatggatggatggatggatggatggatggatggatggatggatggatgaaagaagtcctcctgtcctgattctcatactctatttgcctcttcattctctttggcttcacttgccaatttttaaacaatcctgctctaatgggatatgcaaagtgttgtatggtttcagagcaccttcacacaaatagtgaggtttttcattctctaccacagctctctatggtacgtaagtatcaaccaatcttctccaaagattttcagcataaacatcagtcccagctactgagatggctaccagaacctgtgatctcatttaaaattggggcctgagctgtttggaaattaactatcttatcatcattatcatttaatatatatactaatgttaaacaaataacagataggccggggaagatgtctcaatactgcttttgctctcccttccaaatgttgctttctgaatccagtgcatctcctgaccttcttcttataccaagttgttctcaggtttgagcaggtataagaaccacctgaaggtttattgcagcactaattgttggacccactccctgagtgctgggattcaggaagtcttgtttgtgatattatactactatatctagggtctctattgctgggataaaacaacatgagcaaaagcaacttggggatgaaagggtgtatttggcttacactttcacaccacagtccatcactgagggcagtcagggcaggaactcagactgggctggaacatggagacaggagtcaatgaagaagttatagaggagtaacgcctactggcttgctccccatggcctgctcggttgacctcttatagtacgaagaaccagggaggatatcctcagtgagctggccctcccacaccaatcatcaggcaagaaaatgtcccattgacttgcccacaggccagtctggtgagatcatttctcaattgaggctccctcttcccaaataactctagtcatgacaagttgacaaaactagccagcacacacacgtcgtagacaacaaatgctgcaaaacttcctttggggctagttcttgcatttcttatggtcagaactcctgaaaatagcaatactctttgaagaatatcatgtaataatgacatgtctaatttcttcctggagtgactttaagtatcaatggggttgggtagaggctagtagaattcaagagctcaaaaataccttaaagaaattggaatgctcaggttcatttaaacatttatttctggaaacaagaattttattagaaaattttgtgcagttctctgtattgttaaggaaaaggggccatgcatataatcagtcatgcttatgtgtttttcagttaccagtttttcttactaattattcattttttcctgcagtcatgagatcataactcttgaaaatcacctcagtcagacatgatgacacttctttaagccctcaggaggcagagacagggggacctacctgttctacacagatagtttcatgtcagccatggctatgtaatgaggccctatctctaaaaaataatgtttcatgccagccgttggaggtgcatgcctttaatcccagcactcaggaggcagaggcaggcagatctctgtgaattcgaggccatcctggtctccagagcaagtgccagcataggctccaaaactacacagagaaaccctgtctcgaaaaaccaaataataataataataataataataataataataataataataataataattcagaaagacagattctgtgtattttctcatatgcagagccttgatttaaagctctctctgtgtgtgtgtgtgtgtgtgtgttttgtgtgtgctgtgttatgtttacgtatgtgtatatttgtagctgttgtaactagaatgggtcagtgagagggagggaagggaatgaggggtaatggagtagatgtaacaagaaagcataaatgaggacttactggagaaacaacagggaccagccatcagggaggggaacagagtataatgacacatacacatgaacatggcatgataaaatccattacttggtatgctaacataaaaaaataacttaaaaacattatggggaaaagtctttaacagagaagattcatgttccacaacttaagcatttcctgaaaattgggaagaagccaccattgttctagtgtgggaatgccaaggtgcagattgctgaaagtgttttgtggccatatacccctagagccactaaaggaaaacaaggtgtcagttggaagctgtgtttttgtgggagcaggaggctggtgtgccatgaactgcatcaacactttgagagtagaagtagggttgtaaaagggacatttccatcctttatttattacttataaaatgtaaaacatccttgtatagggatagagcctgcaaaaaaaaaaaacaaaaaaaaaaccacccacatatatttgtttggggaactatcaatggcccccaaaaaaagaatgttgacaactagagtgataatcacacagtccccaaggaatcttgttggtttggagactctgacatttaaagtcttgttttaataactctgggttcctgttaaaggggcgggacttgaaaatgaaatctttacagaatgctatgagtctcaccaaagggtcatcttctcaccagtgtaggacaacaaatcagaaatttggtttcaatctaagaatttctaggagaaaaaaatctctcctatgaatttgtaactacagaaataccttctcagaggtttcaaatttacagaccccatgatgcaggcagccccagattgggcaataaagcctgaaatgaatttggtggttaaactttgcactgaatggcaggtacatatccaaggtatacatttactgaagttcacacatcaggatgagacatatttctgatcatctaattatgtgttacaacttataaatgcatcttcaaaattattaagacgtggaagaatgaaaagttgggattcaggataaccaactatgaaaggatcaagctgaattaactagatgaacaacaagaacaacaacaatgtcataattaatgatgttttaaacaggaacagtgatgggaatcagatagagctgaaaggcagtgaacaaactggaatacagatctagggaaattatttagaatgtggtgtagagaaagcaaggacttaaaatattagaatgaagataaagaacagtgttaacagatgagaaggtctaatgtgtccaacaggaacactggaacaacaggatgagaagtaaagaacactcaggacactcaggcatgtcctggacgctcagaaattatgtccaaattccttctccttaagtgctacttacatttttatgcaaaacagtggcttgcattaaggtaaaccagacctctttggaggtatgaataattccaaatctgtccaggggagacccatagagaatgtggaatatcttgttatgtaaacagcaaagaactctccaagactacaaagatcatattaagaaaatgcagaagccaaccctcaataagttcccgtggatcaaggatggcacaatcattgtaagaattaccatgcatttatttatttatataaatgttggggctaagaacattgcacagttggtaggtaaagtgtttgcctagaatgtacaaagcctggttcaatccccagcattgcataaacctgatgtacacctataatcccaacacttgggaggtgatggtgaaagataggaaattcaatgtcgtctttagctatggtttcaagctaccctgggatatataagactctaattaaaaaatatttatacaaatatttatacaaatagttaataattggaaagagaagcatagtgtatccctgttgcagaatatttgtttatactgtgaagaattgtctttgccacagtgccttctaattggtttaataaagagctgaatacccaatagctagtcaggaaaaggttagggagggcttccagggacagagaggattctgaagaagaaagccagaatgatcagacatacatgtgggaagcaggatagacagtatggagataaggtaatgagccacatggaagaacacagattttaaaatatgggttaatttaagttatgagagttagttaggaatcagcctaagctaaggcagagcttccagaattaataataagtcttcttgtcattatttgtaagctggaggcccaaagaaaaatcctactacacatccccattttatgtaccctaaggaaataacagatctagacaatgattaccaagagctattaatatgaaggagagccacaataaagcattaggctcttcctcagaggaacacaacaccagctatgaaggaggctttccaaacacaaaacagaagctaacacactgaaagctctgaattaactacaatccacaggaaacacacaggcctgtaaatgttttggattcacaacaaaatatagattacaggaaattctacagaacgaactaggttctgaaaagaattgcaaagggaatctataaactaaaagaaatgaaggaagtctgtggactaattgcaatgaataaatcatttttggttcttgattcaaaacatgtatataatataatcagaaagctataagtaggatatttaatgatatcatgatctatctttaggcatgctaatggatctggtttgttaaatgcacacacgcgcatacacacacacacacacacacacacacacacacacacacacactccttaaataaagtgacttggctgagcacaattggttgtcttgttgattaggaaagtgatgatttttaggaaggccagtataaagcaataaaaattgatatgccagtaataacttgacagaacacagtaggatgaacactgtgagtactccctggttatgttcagtaccaacaacaaaagagctgttttttatgctgcttgggaattatagaaaaccctattgagaacagatttcttaaagttgttaaaatgcacttcaacaaaatgacacttcatgataaaacagggaccacttgacatgcaaccttataccctctcccatcgcaacagtggagaagataagggaatcactgccggggaaaatggattgcaagttttgttttcagataatggacaaggcattctctttagggccattttgttttcaatactatataatatcctaactttaagagacaaggatgactgaatgtaatacaaaactatcacattagaaatatcacaaaagacatagggcatttaaaaggaaatcaagtaagcacatacaaattgcagaagttatttgatgtaaaaggaaagttaatgaaagatactgggtcacctgacacctctttaaatcgtgttgggttttggactaacagctgagtccaaggtgtttccttgattctttctgaaattcttatcacttttttgttgtttgtttgtttttgagacagggccacactatgtagccttgactagccttaaactcccaaagttccacctgcctctgcctccttagagttgggattaaaagcgtatgccacctcacccaagtagttctcatcttgtataaagatcttttccctatggaaatggggattaaaatctttggattgtttattatagccatcaaaaagcacattctcatgatgtgttattgttcaaaaatatttttaatcttacaaagtagacctataattcatttatgagaccaagaataaattataacgggaagtataattatttcaaattacacaaaatcagtaaaacttaaaacccaaaaggaacagcatgccatttaatacaactgaaaggaacatgaagtaacctaaagaaaaacagggggaaaccatatactataagagcacaaattaatggaattaagaacaaaaaatgttggagtctgacagagccaaaaaaaaaaaaaaaaagacttctctaatctccttcagactctgagcttatgagagataaagtcacagatgtgaagacaaaatgagaatgagtggagcaagaacctagcaggtacagtgactctccatgctcagcctccatctgtggaacacagagaagcatggtggagagaagcagacacatacctcccccaaacttctatgtggctgagtctgagaggtgggaaaagacccagtccccggtgatgattcacagcagttagtcactgactgtggatcaaaggctgtctttcaaccacagatcacagctcatttccacccaggtgaggagtgatagaagtcaggacaagttaggaaaaactgtttgtgaatgagtttcattttccatttagatgcaataaagagaatcaagccaaaccaaatatttcacatttgataaaaatagacacattttgggcaaagttttaaaaattaaaatggtgcacaataaatataagatgagataggcaataaactaagacaaagcagatattaaaataataaaagagtaatgtgaattttatattaatacatgaacatttagataagaagtggttactttcccaggaaatatagttttgtttaagtgagccagaaagaaacagaaaccagctgcacctataatgactaaagaaactgaatttataattatattgaaactctatcccagccaggtgcagtgtgcatgcctttaatcccagcacttaagaggcagaggaaggtggatctcttaagtttgaggctagcctggtttgcttagtgagttctaggacaaccagggctacacacacacacacacacacacacacactgtctcaaaaaaaaaaaaaaaaaaacaaacacaaatacaaaattaagaaggaagaggaagggggaaaggagaaaggctacaatcaggtcaaaatgatttcactgggtccatccaatcttacacaaatgtaagtaaacaatatggaccaggaagttttctctcaacaatggggtaaatttattggctgaaagggaagattgtccttggtttatcgtgcgtgtttttgttactctttcttttcatacaattttgaaaaggaaaaaataggctggaaaaaaattactcctccatttaatggaagaatgaccaatataaaatctggtctgtgggagacatgatggtgggggtgggggtcattgtttatagtcaatattggtctttaaaaattggaagcactctactccctgattgaatggtcaaaacccaaaacactaacattaaatgctggcacaacataaagtaacaaggaaaaaataatggcaactctcattcattgcttgtgcacatgaaaaatgatgcagcaatattgaaagacacactgtttgctctctctctctctctctctctctctctctctctctctctctcacacacacacacacacacacacacacacacacacacacacagagtcaaacacatgccataacaactgggtgccttgttaagttgaaaacatatatccacacaaaacttgcacaggcaactccactcaaaactaccaaatttggaagcactaagagatgcttcagtaagcaggtaactaaatttatatagtggaatattattcacaaagtgagccattgagccgtgagaaaacatggaagaattgtaaacatatcttactatgatgggggaagtccttctgtgtatatgtttgtcctactggttgataaataatgtactgttgacctatagggaggcaagttaggcagaactaggaggattctgggaaatgtagtaaagagaagtcttataatccaggcaggaaatgacatagcaggcagactcagaatataagcagggacaagcaggaaatcgtgctcttcctcctcctctctgtgatcccaggaagacaggacacattccatcagcatcctccataagataagtctttataaatacatagattagtaattatggttgataattaagactgagataacaactaagaaatcctagtcattggccagcagcattgtacctaataagtctctgtgtgttattttgggcccaggtggcttggtggaaagatttattgttacattactaaatgaaagaaggaagccagaaaaaagtttcatactttaggattgctgctggacattctgtaaatgtagggggaagggagatatggctgaacaaattgcaaaggacttttaggggactgaagctattctgtagaattctataatgagagggacatgaaatataaaaattttaaacccataaaatgaactttttctaatggtgataataatgagtggtgatgtgtgtgctagaggaaggaaaataaattgggcaaaaaatcaggactgtcacctaggcaaaattcctaggagtctagctatatagttcatagtttgtgtcaaatctttctttctttctttccttcttccttcctttcttcatttctttctttctttctttcaggacaccaaatagatttcagtatctgggctctcattaacactaaaaaataggtcaaatggctagtagcatcttgaattctggaggctacatatactgtgtttgggagtgctattctattccacttaccaaatagctcagactatcagtcttgaaaagtgtctagtcctctattcaatgtgctctgctgtaaggtcatgtgacccagcacctctactgatactaccatatctggcagatatagatgctgcaaggagccttggaaagtcccttttgcatgagccacagtgaatgtctttaggattctggaatgtaactataccatcttttctaggtatctgtttaactttgagaaatgttttctgtctttgagttgaactctagcccagacaaaacccttggctataggtcacacgttaatataggctaagttgcctgctattaacaggatattatttgtcccatgtgtcataaaaataagcatgcccagtgtcctagttaccttttgttttttactgctgtgataaaacactgtgtccaaggcaacttagaaagaattcaaatgagcttatgtttccaaaggcttagagtctgtgctggtggagtaagcatggcaataggtggcaggagcagcagatgagagtgtgtaggttcacctgtcctttctcacattaacttatgggcatcaggactacaggtactggcacagaaatgtagatgctgtgtctaccacagttgcagtgggtaagactctgtcacttgtaaattgtagggtttttatgtttggaccatcacctgtgaaaacagatggctacatagttcacttgaaaattgagtcaaatctcaggctttttatagctcttgactatcaggttggctgctaggcagtagggttggtgctatgatgtaggtatcatatagtcaggtagatataaagcagtgtgagtggatattccaactgagtgaatgctatagacaaaaacctgtaagcatcagccattatctgtatgaggtggtgagtagtttaacttaactacaacagagggtttgagctggcaaataccaaaaatatggttataaaattaattcggaactaaatcactgttaaaatgtctttttaaaaaaaggttctaagatgttatcatgacatatcactgtaatcctaaccctttggagaaggaggcaggaagagccagattccaaagatagctttgttgcatagagaatttgagaccagcctgggctgcataagatcttatctcaaaaacaagggtcagtgagatgtttcagcccatgatagcactttcctccaagactgatggcctgggttagatcccttagatccatgaaatctaagaaagaaccaactcctgcatattgtacttggtccatttgtttatttacttgagtttcaaatcaaggtaatgacattgaattgcatgtcatcaaagaatgaattatcatacaagaaaagaaagtcatcaggtctcttatcttgacactgacagccacttcctagctatgtgatcttggataggttacttctctgaggccagtgtcctcatctgtcatgggaaaaataacagtcatcttgacttaggaaggtgtttcgaaggttctagataatgtctctaaaatgcttggtgtggtgcccaggacactggagatcaatacattgtgatggtttttatggagcattcatttgtctagaggaaacaagactatagatctcctctgtcctgaggtcattacaattgtatggggataagataataaggacctaggctaagctagtgatgtatcaacaaaaatatactcagcacatgcaagtcttagagaccagtctggcgtaatgatatctaagatttattgagtaccttacatttgccaaatgttgttacaatcccttcaaatattgatttaatcttctaaaaatgctctgaagatggtgttgccatctcatgattgaaaaaagaaagaaaacaaagttcaatgagatgaaataacttcaagtccagtaatgaagaaaatgccagcaaagacaccagcaaaggcagcaagacctgtgcccatgtgctagagtgccaggctgcactcattccccaggggagtaagctaaggagtcaacaggacactctgttttctcagaggaaactcagggttttgctgccaccaacaacttttgtttcccaagagcaataagacaaaattcacagtcgtccccttttaaccccttaactcccataattccccccatttgactttacttctctatacagacatcatgatatggtagacaaagtttaggattagatgaacctcagttgctgtggcagctccataactcactagcttcagtcatcttgtgtaatttcattagaagtcacttaatcttgaatatatgttctaagctataaaataggggaattgtgctttatattaagattgtggtgaaagactcatggaaatctctagttagtaaatatcagttacctgctctcagctacttatacttttccctccagggctgctttaaagccatggttacaaactctttggtgctttcccttggaatccaggcaggctcttgaatgcttcggccaacaatagaggaagaagattcatatgacttctgtgactagaccatcaaagacgaggatggtagttcttgtctggttgctgaacgtttactcttggagccatgtgctgcctctggaagtctgactaccctgttggtgggcagctgcagaagagttccaagtatggccactgccaccatgtatatgccggacatttataagcaccacagttgcccactgactgccatcaaatgatattcatcaacactacacagaaacaaccaattgccttgacaagccacattgcagcaccccacttaactcactcatacaaacataggtaaaatgaaatggctgtttcaagtcatgtcatttaggggtgatgcagaacactatcctccaagcagaacaaaagccatgcttattagatcagctgtgtctgtttgcaaagcatcatttatcacaaccgagcttgttgactgtggacataccctcaaagaaggaaagatgggcggggagcaactcctcctcccagatatatgaagttctgccttaattgccttggcctggggtcttggggagggactcgagtatatatgctagaatggactaggggtaaggcaactctgtgcagagagtggaaagccacgtgctggataaagacttcttaaatgtctgctctgagattacccacactccctctactattctctgtaagtaagctcagtcaaatcattggtttcccggagcaaactatgatggaatcatactctggtttatggttaggaccttagtaagagggggtagacattgttcatatctccccctggaagagtattttagcaacaggaagtaatgtactaccttgtaatagtcaactaaaacatctccttttttataccaattcttgcccattcttgtttgtttgtctgtattttaattcaggtcttcttcttcttcttcttcttcttcttcttcttcttcttcttcttcttcttcttcttcttcttcttcttcttcttcttcttctcctcctcctcctcctcctcctcctcctcctcctcctccctcctcctcctccttctcttctttgtaggcattgttgtccttgtcatcatcatttcctccccatctcgtgagtgtgtgtgtgtgtgttgtatgtgtaaagatcaaaggccaacaccaagtttcttccttggttggctccatcctactttttgtaaaatagtctctcactggacacgggacttgtcagtttggcaggctaacttgctaatgattttccaaggattctcctatctctaccattccccctgcccctgccacacatcttttacatggattcccatatctgtgggtcatctgcccagtcatgcatactcatgccttcatgtggaatagtacttgggaaagtcattttttctcctgtgcctctttcctccaggaagactttctgagcatctccattgtgtcagatgccatatcaaacataagcactctcctctaggtcaggttcagcaaacttacttttaaaaacagaattttcattgtttaggcttgtgtcaagaatctcagatgcttgagagcagccatagatatgaaagaaagatagctgtggttgtactccaataattaatctagctaagtgaattgtgtattcacttacaaaaatggacagcaagttagaattggcatgcagactggagtttgctgacctatgctctgtattcttaacctctggatggaaacagactttcttccatagatgtgctgttccctagtactactgagcaaccactagaagggcccaaacccaccaattcaaagaggacccaagctttaagctcaatcctaaccaacagatgagtgggcattcaagctcagtgatggagttgcaaaggcacctagcctcaaagcacaatgccagggagattaacagagctggagatatagatggttctcaatgaaaaatgaatgaaaggaatggaggagcctcgttttctaactggcttctttctgtcgttcattttgcctcccagggacttaggaagacaaatgggagaaggcaaaaatggtgctgaggtccatagttgcctgccaggtattttaaggccatcatcttttcttttaagaaaaaaaaaatagctccttgaagtggatgtcttcagaacacattgtaaaaccacttcctctcccagcaacatagctggcactcacaggaggaaaccagaatagcatgtaatgttctaacagctcttccagcagggagactaaatacacacacactattctaaatttgtatctgctgtgaacatgaacaatgccatagtgccattctgttacaaggttcatcgaacaaattgtatgcacaaggggagggggcatgcttcatcattctgacttttccaacgtcaacctaatttctttagactaaaacaaacactcaggcttcacttttccctctttcctttagaaacttgaccacatagatcgtgaacacagattaaaacttacacgggaaacttcagaacaatgcaggttttcctggctatggctgcctctatgtctttacattggctgctaactttgggtaagagtgtccattaggttatacacagaagtaagagggagagctgtcaccgcaggaacgtcaaagctacatactctcacaagggactacaggcatactgctgctggtttagtttttgcccccacctgcctcccagctcattcgtcctcttctgctgagtggctttgcccacactcctatgtctccttccttagcaccctttggcttttacttctacttcaagtatgaaatgttccccactggttcagatggttaatgcttggtctcagcttatgcagctcttttgggaggttctagaatgctttggagagacggtctaactgctgaaagaaggtcccgcgtgtacacgtgtggggggggaagctggggggtgtctttgaaggttatacatggtcctatctcctccccttcccctgctttctgtccaccgtaaagaaacagcttcttccattcacttctcccaccatgatgggctcaccatggttgttgtgattttttcttaaagtggctcaagaaaaaaaggcaccatgtgacagagttcacgtagaggtttttcttgtttgtttgtttgtttgtttgtttgtttttaattaggggaaagggaatgggaaaagcaggggttggggagaccagcctctggggactggagcagcagaagagaaaagacaggcagtagagaaagaaaagcaggcacagaagcagagaaagggaggggggagagagagagatgggagctgggcagggcccttttaaaagggaatgtaatgaattgcacaggaggtgctcttagtggctgcagttgaggatgtacccagtcagaatccctaaggacagtccagtctagatgcatgaatactaacactgggcccagaatcaacagagccaaggctcatgaaccaaaatccttgagcccatgagctaaattcatctttccttctttgaatggttctgttaaatatttacttacggtggtgaaaaaagtaatggatgaacctctcctgccaacagttggccctcaaataagaaagcacgtgactgggatagtgtcattaagaggaagcatcctataagaaaaacccacatcttacaaatgacatctcagggtcagatacttatcctagagtctatcagctaaggtaaaatgggacaatacaggtcagaagaactgtgctcaatgatgtattcagctcacagacatctcgtggatttgtctccaggatgcagccaaacacccaagtcccattgctaacctgtgggtaccaaaagacaatgctctggaacctgctgatgtctctcacccactttcatcatatgcccacccttttctggactctgaatacctcatcatgattctgtttctaaccatttgtacttgtatctctctctctctctctctctctggattctggcccttccatattgtgatggttgtctttaaattcaacttgtcatgcttggaatcatctgagcagagagccttgatggaagacttgtctgcattgccttaactggtgtgggaaggcacaccctgcaagtgggcagcaccttctcgtagcagctcagatagatgaaggggacatggcagaggaagaataatggccttttgctctcatggccttccttcactactgagttgacttaacctgttgctgcttccttcactgatatcaaaccatcatttcctgacttccaaggtccagaggttccaggatgggttttcagcaccagagtaggactactgaggcaccctgcctcaaggaccaagcaactaccaggttctcagtctctcaacagttactatttcaatataagctgacttaatgcattctctctctctctctctctctctctctctctctctctctctctctctctctctctctctctctctattggttctgttcctcataagaactctaatacaagtatcctttacaggcttggactagggcttactctgccgcctgactttatttcccaccatctctgaagttatcctgacccagtggacctaataaagcagaagcatataggctaacctgctataacaaaatgacctccaacatagacaagcataaataaacatgaacttgggtctctctcaagtaacagccagaggctgccgttccctaataccataagatatggcttctttctggaatcaacatagctgttcctatgttatgtaatgtttgtgtcagccagtaggctatgctacaagcagctttcagctacaggctggggaatgatccacatttggtgggatataaagttggtataaagcctggggccctctttaggataaagaatgcaaaaaaacaaccaggaaattatgactccagggcctttgaagggcctatggccagtgggaggccagcaagtttaaattctgttagctcatggtcactcaacctgtgtttaggttcactgatcgatatcaatgttgtagtctagagttctctctgtacctaaaaggtgtggtttgggcaatttctacaggatgggttttggagcattacctggctactggcaaaggtggttaggaatgttttgctaagtagcagtaagacaaaacatagtaagccttggatttctccttcctggtatttttactctagttcccttactatacatcacagttcattggtgggctgtcttcagcaagggctgaaaaatgtcctgcctgtgatggtgtaactgaggtagactggtaaagactcctccagaggtttcctcttgagtagagcctactgctgtatgaccccctcactggtggagagaccttctgtatggacaacatagcataaggagctcatttggcggctgctcatggaaactgtcttcattttcatatcaacacacactgtaggagatgaacagcacagtgtagtcctgcatgcagccaatcaagaccaagctaactggatttcccaggtacttggatacttggggactgaatattacatgattacacagataaacacacccgtccacaaggaccaaagaaatactgcagaaggctgcagaataagcctttagaaaaagcctgggctctttagagttccctcctctctcccccctttctttctttctttctctccctctctctcctctctctggaaatataataaaacttcaatacaattgaaatgcttggatttgtgtattattaatgagtcttactgggtacggcaatgttcctttaagaaaatgaaaatttgaaaagacacatgcctgaggttagattaaatcaaatatataaatactagcatattagggcaaatattcaagagctgtttgccaggagggatgatgattgctattcatatctgtgtttatatctccttgactttatatccaaactttaaaaaaataaaatcctgttcttcaactgttaaagctatagcaggcttctgtctgtggagaaaccattggtctggcagtgagcttatggcttctgaatggatgctctccttgatcatgctctgcatgatctctggcgtaccagtaactgtgtacaaatgtcatgacctttgtcttccttctctttgaagaagggtactccgtcttctgctttgctgaatattctctgggacccagctctaatcatccctcctcttccttcacttggccttcatacatgaactactgctcatgctctctctctctctctctctctctctctctctctctctctctctctgtctctctctctctctctcttcctctgccctgggcactgagtccagtctatggaggatttttctctagtgctctaccgctaaatctcaagcatacctgaaccaattcacttcccaagccctctgccctcctcccagtgtcttgcacctctatctgtatgaaagcccccccctacacatacactcttcctagattaactcctgtcacctagcactcactctccacacaggaccttcaacagaatctcttacccactttggtgagggtgggggcacatgtatatgcagctgtgcataaaactgtgtgcacatggatgtggaggtcagaggtcaacctcgggtgtcgtgcttttagatggggtctctcattaggacttggtgctctgccaaatatagtaggctgaacagccagggaggcctacggatctactagtcttcccatgttgggttacacgcacgtgccaccacagccagctctttttacaagggtactggaggttaaaggtggatcctcttgcttctagagcaaggactttacccactgagctgtcccctctgctctctaatcccataacctcatatttctattaagaaccaccatttttgtcttcctgtccttattaccagaacaattatttaaagacagatcagttagatcactctctggtataaaaccctttcaagctccccacaaatttcaggataaaaccatgtccttaccgtggcatacaaagcccttcacttcctgtctcttgtttaggtatgtaacaaactaaaatggtatcagatggagtccagaaagtgtgttgtccttttgtgttctgtatttgaaggctcctgtcctctttcacttggatgcttaacatcagtgagttcgagaccagcctggtctccagagtgagtgccaggataggctccaaagctacacagagaagccctgtctcaaaaaaaacaaaacaaacaaacaaacaaaatcaatgacaccctgcagtgccttctctgatcccatcctcattggtttaggacctcttttctgaattgtcataatctactgtatcttcctgctccttggttcctgccatacttcatgggtgttgatctgagcatcctacattgaaactcagcctgggggctgatctgagtgtcccacactgatactcagcctggatgctgatctgagcatctcacactgatactcagcctgggggctgatctgagtgtcccacactgatactcagcctgggtgctgatctgagtgatccacactgatactcagcctgggtgctgatctgagtgtcccacactgatactcagcctgggtgctgatttgagggtccggaactgagaccgagcatgggtgctgatcttgtcccttgctgacattgagcccactccatgctgagatggagcccttgagtcttctcttaccagaaatagacactgtacctcgttcttcattgtgttgcctatttcttggcatggtgcccattcacaataggcattcaagaaatgtctatgaattttatagaaaggaattatgtattagatgattagacttgatgactggctatttctagaaaccaagcatatgaaatttgctgggcaaattccattctgctcaaactatcacttctcacaccctaaagttcaagtttcttatgttttaaacaatagatagtttgtgaacacctactatgtgtcaggtatctcactgtgctccaaaggtgtctaagatataaaattatttacagcactcattctctctgccctccaaaatgacatccaggtgaaacatggttggtaagtaattattattacaatgagtcaaataccattaatgtaattaaggacatatgagaagccacagattagaaccactactttcaagaaaagggaaataaggaagaaaagatacttgagataggagaatggattggtggctaccagcataataagggggtttggctgtgctggggagtacattgtagacataaagatcagcctttgtatttggaacatgagactcagcttggccaaaaaccctgaagggtaattcaaatcatgccaataaatttgtgttacgccttataggaaatgagtcatctttaatagttctgaacaagtataatctaatcaacactactgagaagccttggtatagttacatggaaagttttaggaaaggaaagaggtggctgtaagaacagtggtggagactattgcagtattccagcctggagatcttggtgcttgtgaacgggcccttggttaactggatttcccaagcaggttggttacttgcttaggcaagtgtcctccttaaaaaaatgagatttgtaataactaatgaatgaaattttataccaagattttggaatggtactcataaggacataaaagtgttttctactgttgtcctgtgagggcctaaaccaacaagaagatagaaaatggtaaagaaaagttaggagatactgaaagcatttgggtgtggtaggatgttggggtaaagcatataagttaagtcaaggaggatccctagttccaggcttgagtgactgagtgaagagagctaactcccttcgtataaagagcaaaggtgttttctttgaaggccaggggttgttagtaactgttgaatggtagttgctctgggaacaataaagaagacatgttccaaggctttggagaacacagatctccagctctggagagatattcttagaggatgcaaaattggatcccatctgcatccaactggggataaaatccagggaaatgcgtggccaggccacctgggaaggagctgagaagacagttcataaagaagacattgagaaagacaaagtagaggaattaaatgaaaatcacagcacattgaatgaaaggatacacaaggccacttgttgcttagcaatggcatgaacagcaggcccctaatcatacacttcaccagagagatggttcccaacttgaaattttatgaaaatgcagatttgtctgcagtccattctgtatagtccagctcaaatctttcaggctagtttgtatggatagtttgaatcccaggggcaaaacaaatctataattttatagctttaatacttgaatttttcatttcacatagcaggtgtgggcaattcagctttcaagtaaatatgaattgcttgttaaatcaagaactaaatgcctatacagattaaatcttcaacagggcaattacataagggatggagaaagagccccaccattgtttgggttaccttttggatagattaaggatttacaaaaaaatgactggtatgatttatctgaactatcagctagtctaccatacatgaaaaaagtaccagcaggtcatattagctcacaaggaaatcatgatcctatagaattctcataattagatcacattgacaaaggttaaagaggagacagaatcaaaactactttgcacagaagtgcatctttccataatttaaaggctttggaaaaccccaatccaatgttggaacatgcatagggaacctgtgtctgtaattttgacattcagatgttcattatgtattgagccttagtcagcacagtgaagacaactgggcaagcggcaacgtttaagggaaataaccccatcccttcaatggagtttccatctatggaaggacgactcagaaaagaaagagataaacaaaagtgggtttggggggctggcacagctggtgacctgaattcaggccctggaacctgctgtggaatgcacatgcacacacatacactaaaatacatggatagctttaaaatttataataaaccctgtgaggaaaacaggtagcaaggagcattagagacagagcctgttttagttaggatgaggatggcaggtctcccttaggaggtgatatcaaactgtcatataaatacaagaatgaactgtctgtgaaagtgaggtagaacatttggcatacgtaatatttccctaagttcaatggatagaatttacactggggagaggtgatgcagccataatgctgtcattgcttttcaaaggcaaatggaagctgaaatgagaccagaagaggtgggtcagccgtgggactcttgccaaagcccgggcaaaagatgataatgaccaagactgagatggagtagagagacgatgagagactgaggagatttttcagagctgtaactgatgtgactattttctggagtagatgacacaggatagtctatgaatggagagtgatccccagggtcctccccgttaacatggtggttggtgatgccttttaaggggtgcagcatgctgatagtttgggaggatggatagtgcatactttcaagctgtttgtaccatgtgtgcaatgtcccagaggagcagctgagaaggtaggcggcagagtgagtctgtggttcaaacagaaaataaatctatgaatggataccccaaccatgcttttgaagaaactgaatttctggtgctggtttcctcttaaatcatttctgtatatgtcccatttgcaggaggagtttatctttaaaacaaaatctccctcagagttttagaagcacatggaagaagacagttgtaacggccaggcatgcggtgcacatctctaatcccacctcttagaaaatacttgtcaggatgagagaatcactccactgctacaaatatattggtagctgtttaggggacccatacaatggcaggacatgccctttcccccagtatatcacccaggggtcatctgagactccctcctctctctggactttattttcactttagtttttttttttccccatcccttcctataaatccaggcccatccttgaagcccaaattagactctttaagtatcatgtgtatttcaggaactttccataattaatctctactccagtgcctctttaatttcatttgcacacatagcacctgttaagatgcagatttgatttgactggcctgcagcggggtctgagaatctgcatttctaatgaagtctctagtgatgcagaggtgtctggtccatggaccacggcttctgagaatggtggccacatacagtgtcattaccatgtattatactgaaagacccgctcgaaatgcccctgagccccctgccccgaagctgccggggcctcccaagccttcaccccggcagggctcgcgcccccggcccgccctgcctggcaccgcgcctcggggctggggccgagcaacgagcaccaggtgggtcggcacgagaacaaacaccaagtgagccggcctggagccctgcccctgagcccccgcccgaagagaaacactccgtcccaaggtctccgcccccaaggtcagctatcaggaagcagaggggggggaattgagtctgctgtaccagacaccagaccttgagaatatgctgatctggaatggctctgtgtctcatttgaaccatccaatagaaatgattctgtatttcgcctcatttgaaagactctatgtttcacctcatttgaataactctgtactttgcctcatttgaataaccctgtatagcgcctcatatacattgaccaatgggaatagctctgtataatgcctcattagaattatccaatagaatccctgctcctagcttgcgcctttttccctatataaggacccctttcccttggctcggggcgcttagccacacagaagctaagtcgccccgggtacccgcgtctccaataaagcctcttgcttttgcatccaagttcgtggcctcgctgattcctgggtgcgggtctccttctacgaaagtacctcttcgggggtctttcaatactaacacagagtcctaatggaggcacatgagcggattggctaagatagaagggaaaaaaaatctcaccccagcacctatatttgaggaccttgcctttacatttgttcttcaaaaaaggcatgaggatgaagaataatctttaaaaaaaaataaactccaaaatgattacatacctggagtgagcctgcaggttggagaagctggtgagcaggtacccatacaatttcaaatattacttgagtttccccacatgggccaagaccccggtgatactgctgtggccatgcacaggcatgctactgcattacataagtcatggcagcatccctgccatcagaagaggcaaggcgctttcttgtcatttcccccaactggtgaccattaattataagtagcagacaaccacacctaccacacactcctttgagcctggccttcatctggtataagtggcagaggtgatccagccaagggatagcttctggatcccatgctttagtcaggggagttggttctccccaggcaggagagaagatggaattcaaacacagctggtggactggagtggtgctaacagttctaaaataaacaagactttgagagaaccattgggtctttattgagagaaccattgggtctttagagaacatagctagagggctctcttccacctactgacaaataagggcggtttccagaatgtagcttaacaggtggtacctggctgtcggaatcagtgaatgatctggcacaaactgggaccaacaggtctgagtgaaggtaactggcattttaagccagactgatgaagccacactaagattctgggaactgttgcctttgcatggctagtgaaggatcaaggatgcctccttaggaagttggtgcctctctgagaagttgggatggagattaaaggtgaagtgttgaggcatctggcatactaactagtactgcttatttggtcgctacacaactatcacctcagccttctctctctattcttttatctcttatccactctccaaatcactcaactggggcttaacctgggcccctgctgtcagctagccctgctctgctgggttgggagttttcactcatttgctcaccagcttctccagcctgcaggctcactcccagcaaaacttcttccctgccctgcctttcttgcaggcaagcaggactacaggctaattcctactttctggacttacttcctcctttctctgctgtctcatctttacagagtggatggtatttgtgaagcattaggccaagggctagctttagtctcaaatataaacaaaaaaccaaatccactgaagcctcctctctatcctgtttaccaaaagtgaagccaggggcctctgtttacaatgctctcaaaatcctctgcatagagtctagcctgtggtagttttttcagatccttcccaagatagttatatgtcaaaagctgagcatgacagggtgaaggttacttcagggaaatactgggattccctccttcttgttggggaaactggattctatgagccaaacccttagtttatctgagacagataaagactaaattgacttggtatgtatggtatgtacctgcatagcatacatgaagaagtaagaatgaaattatggtttcactgggcgttggtggcgcacgcctttagtcccagcactctggaggcagaggcaggcgaatctctgagttcgaggccagactggtctacagagcaagtgccaggataggctccaaagctacacatagaaaccctgtctcaaaacatcaaaaaaaaaaaaaaagactattaggaatgtgggaggaaggaagggagaagagagttgagaaaggataataaggcgaatatgattaaatatctatattaaaatgtcataatgaaacctcttgttttgtacaaatttttaagttaacaaaaaacaaaaataacattaagaagagtgaaatacagtttgtttctgattgccatttggggagggaaggtgctggggggaggaattggaacccatagggtatctataatgatttgttgttttggttcctttcaattaagaattcccaaagtaagtaaaatatttttaaaaatcttatcaagcctgcccagcattgtagttatttattgtattattgttaagtcttgtatgcctgtaatatttcatagtaatttttatcataatgattgtttcccttttgcctaagctttgagaggtttcttagatttcacaaaaaacatgaaaccagaaccacagaggccgcccaagcagtagaagtttctttctttctttctttctttctttctttctttctttctttctttctttttttctaaatgctgaacaccctttggtgtctattttgggctttctttccgatccaatgtttgagggagtgacctgcatgcaggtcatgggagttgagcctggaaaatcacagtggtcattaggctccagtctgcccagtggagagctcagagctgtgtgtgagtcattctccctgtagccccagcctgggctgacctccataatgtctagggccacagaaaaacagaactcctaactgaaggagttggagacaaagaggccttacctggtcacaggatacatgaccacaccctgcatggtatggaatgagacaggtcagacctcccgggactttcactaggtgggtttgcattccaagtagctgaactgtgggcttaactctgagagttctcctgaggaatgtcatagaccttctgattgaagggccatgtgaacacagagctggaggttgccatcagcagcctgactgcctacagaaattgaggactgacatttcaggtcagtatgagtttttgctgaagttaaactcttctgagaattaaaaaacaaaccacattatctttatatatatatatatatatatatatatatatatagtatcaaaagtatttatatgtaaaacatatttatataggaagttaaagaaaacaacaacaataaaaatcttccaaggaagtcacttcttggctatcaaaggctagcttctagtcttttgttttccttgcaccatgtttttgtctagttcgttcattctttcaacaatggttactgaccaagaaccaggctttgttctgagagccagagatatataaacacatggaatagtcaaaatccttgcacttacggagttaccaaggaggaaaagtaggccgaccaatcaaccaatcaatgaagagaacagacttgaatgtgcaaggtgaagctagatagacaaggatgtaatgggagataacacaggaaataaaacaggctgaagacttctagggcactgtcctgaacccttcacttggtatgcacatctcatataatgagagtgatgagaggagggagggagggagggcttgaatgagacaatataaaagctaagatttccatgaaaggaagacagtcacgaggaagtccaggttaaggtgcttcctagcagaggaaacagagtgtttataggctatgagcataaaaaaaaaaaaaaaaaaagagttcaacatgttcatgaaacagaaaggaaagaaggttatgtctggaatactcaagagcaagtgtattgtgtctgccttgtggttaggtcacacaggtcctggaagaccacagtgaggacttccaccttattgtaagacaatgcctttggaagaggctaaggagcagagagacaagatctgattatccatcctttgaaagggccggctggacaggatgtggctggtgaattttagcaagcatgaaataaagctaggagatgagattcaaggttgctatggtcagccacagggagacgatgcccctaggaccagaaatagcagaacagatgaaccaaagcagagttgatttttgttgaagtgatattgtttttgtattgtttttgtagtgatatatatgtgtgtgtgtgtgtgtgtgtgtgtgtgtgtgtgtgtgtgtgtgtgttgcttgcttgtttggctcaattttataaaatagaagcgagttaaaaattcttcaaaaacatgctataaaaacagcttatcaccaccaattcagaattccaaattaggactgacattagagatcaagttgggatgcctaagaatgccacatcatgagaacatagaaggatgatatccttggggcctagtgggagcagtagaactcagtgatccctccagctgttccattctccccatcacacccctaattcacactgtcattcctgtatgaagaaagagtggcttttcctcagctgctcctcatgacgcaaccttgtgcctgatgggtcagcatctccttaacaatctggttggagagagatggctcagtagttaagagcattttctgctttgccagaggcctggagtttggttcccagtagccacaatgaacatcactcaaccacctttaactccagttccatggaatccaatgcctctgctggcacctttacacacacacacacacacacacacacacacacacacacacacacacacacacacacgtacatatctcgtacatatagacacacatatatacataatttaaaaagacatctttcttaaaagcacaaaatctgaaagagagggggctttgactgctaaaacttcccaagagccagtccatggaaagttagagcagctacagctgagctcacatcagcagccacttaccagcaacctttctcacttgaggcctgcacctgctataaactgcagtaagtctggattcctcatctcattgtaaggttttggcccttgcagattttttgctaataactagacaatttcctgtctcaatttcctagctgcagtttctatattctaaactttgctgtgtggttttttttttttttgtgtgtgtgtgtgtgtgtggtatactttcacatatttaacatttaaatttaacatatacacctcatggtacaatgtatcatagtttctataaaatgacagttggtgtcctccaaatgtcatcttttgacaagtcatagtcattaatgtcaccatattacacagcgatatactaagcaggcagtggtggcacatgcctttaatcccagcactcaggaggcagaggcaggtagatctctgaatttgaagccaacctggtctacagaatgagttccaggacagctagggctacatagagaaaccctgtcttcaaaaacaaaaacgaaaacaaaaacaaaaacaaaaaaagcagcactacacagagggacaaaaagatgacctattagaagctgtgtagctagacgtgaaggagccagggtttgagtccaggcagatgcttctacccatggtggttcacaaagaaatgccttcacaacacttaggcaactgaaattatcagggagcagatgattggttaatttctaagataaatcaattaactcaattagtgaagaactcctgggcacctacagtgcaatgctgggctaagctataggatacaaggacgaacaagctgctgctgaagaggctgaaagctgccatgctgtgaacttggcagtgaaccaagtgctatggaaatggtggtgttcagcacagttcagaagagtttcatcacagacctccatctggtaggagacacacaatcactgtgggatccatgggatggtcactagctactatttacattagaattaagtaatattaaaagtgcacttccctggtcatgttagccatattgtaagtgctgtctgtgctagcctagcatccagcacagatcagtgtcatcacacaagttctctagagtgtttggaagcacagaaaggagactgcacatcaagatgtggtgataaggatgagtgctgggaaagggttcctcacaagtcatagttgggagctgaaggatgagtgccttcagtccttactattctcctgtgaggcagtatatatctctacttaatgagtgaggaaatggactcagaaattgagaaactaaacttgcctgacattgcaagaaagatgagcaagggcatatttacttcaaacctggtcagctgcaggactgtgctcagaagcctaatactgtaattaagggaagcatgggtaaaagagattaatactatcttttggaagacatagacggcaacttcacaatatgaattggtcactctgtgctgtgttctaatgcatttgtgaagtactgatgagatgtgtgcagtgtacagaaaactaagatcccttgccacatgaggataaagacaagcccgtgaactcttggcagaacaagcgagtggcctctaaacactgtaggaaatccaagaggtggcaataatgtcatcccatgaaaactcattgaataatatcatctcaggaagactcattgaatagtgtcatccatggaaattcattgaatggaggaagagtcaaagatgagaggggccctccctgttattgaagatgttgaatatatgtggatagcagaagcattcaggcaggagcagaggcttagagaagctgagagtgagatccacaaggcagaagatgacgagatgagcaggaatatctatggcttaggcttgagggctataaaaatgagatgactcagtcctctgtgtagttatgggctctcaatgaaaatctagaagagtcttaatggatataccctaagccgttcaactcaggagcagagcaaagagatcagccatcaggctttcatctctgggagtattagatatcacttcacacgttctctttctacgaaaaattctttggagaggctatggggttacacttctttgtttttgtggtatgctacagttcttccactttctctcacacttctctacaagccctgaactagacaccagtgcagaggttttggaattcctttctgaaacttgaagtcaatatattactgggcacatcaggaaaaaaaaataactggcatcctatagacttgtgaatagcacaaatatgacatgccaatgctgcgacacactggctaacttaccaacactgtaatgcattgtggatattttggttcactgtttacacagtatctgctctgttctgcttttgtctacacacttctgtattttttctgcacaagaaaatcatccaaaagactccattctagtttgagttcatagcatgatcagttttcaattgtttggtggtgagtatgtctcccttaagtattaaacatatcatacaatgaacactttcatacagtatttttggtatgtgtttttagttttagagaacagagcccaaatggggtgattgggatacaggtttggataattccacactccctagttgttctttaggaagaacattatttaatggtctatttctccaaaatattgagtttgtacattgacttgggattgtatattgcccaaatggtctcatactctctatgtaactgagaagggccttgaactcttgatcctcaggcctccacttcccaagtgctaggattacaggtatgtgccaccatatccagtttatcagatgctggggattaaaccccaggcctcatgcacgaggtaagcatgctaccaactgagccacagttccaattttgagttattgttttgtttttactaatttaaggtatttggagcaaatgagaatcccagatctgttagctttggcaacattgcctctctgcctcagagccttcatcatgagtgtggataacaagactaaattcaaaggttttggatcgaatgagatcacccagctaaaccacctggctgagggtactgtacatagtgcagaggtaggccatgtcccccctcattcataagaagtgtgcaatggtgctatatagctccttcattttgcatttttcctttattgttggtgagaaagcatctgtttcagatggtgatatcctatctgggggcatgcttttattttcattttatttttattctgtatatatggacattttacctgcatgtatgtctatgctctgtatgtacatattacccatggaggccagaagaggacattggatttcctcagactggagttacaggtagttgtgagccacatgtaggtggtaggaattgaacccatgttgtctggaagagaagctagtgctcttaaccatggagctatctctccagccctactggggcatgttttaatactgtccccttcctgttctctttcatctattgtgtctcaccctctattcaccacctggtccaagctcatcactatggtaaccagattcaaggaacaatgttagcaggacacaggcagatgctagaaggctatagcatccttcctacaaattcagtgttcaagaactgccagctttccaggtggaaaggaagcaccgtgactgcctgttctactttgtagtcacatgacccttccccatcagcagaattggtctctccagaatgtactaaataacacctattgagtaaataccatggagagtataggcaaagaagagaatttgttctgttcattcttggcacccaggtatcatggtcagcactctcctccactacaatcaattctcagataattataatatcactgagccaatttttgaagcatctttgagaaacatttaattaaattcttagcatgtaattagcagggcatgaagcagtctttttgcagagaggactcaaacattacctaggtgggttcctccctggtagtttctagccatgaaatgcataaattttactttcttcttggtctttgacggtgtcaaaaattgatgaactaaaaaaaaagaggacttggatataccatttaaaaggataaaagtaaaaagccttacaaaaataaaaactgaaagtttggaagtccagaaggagagaggatagattgttttcttctttcagaatacaataccaaagataatttttgaaacaatagctccatttagaacactataattatccaggtgttggtggcacacacctttaatccaagcatttgggaggcagaggcaggtggatctctgtgagttgaggccagcctggtctacagagcaagtgccaggataggctccaaagctacacagagaaaccctctctcaaaaaaaaaaaaaaaaagaaaagaaaagaaagaggaaaactattaaaaagaaggaaaaagaaaactataattatataatttaatgttgtaattggaacaaaaaagacaaaataaaactcaaaattgtctcaaaaatggtcttatcttaaactctagattataaggtagagaaatttaaattttactcttctatatcattttaatgtatttttttttactttgaaaatgtcttcattgaggtatgttacatactattcaatccacccatcaaaagaacacaatgcttccagaagattcaatgctatgtgtataggaccgtgtctcacccttctgcaaatctacccagtaacagtcactcccaacctctctagcaggcctccctgccctgcagctgatttctgcctctctagatttgcccatttttgatattctattaaaattgtaatcaaataaacattgtgtctgccttttgtccatcagcatgttttcaggattctaccatgtgtcagagcttcatttctgtcattgacaatttacattctatagtgtggacataacccattttatttattcattcactagttgatggacatttgtttgtttttactctaagctgttatgaacattagggtacaagtttccatgtggctttgcttccacatctcttgggtaaatacctagggatggaattgattgctttatacttaatttaaaaaaattaattccattttatgtatttatttagcacatgtatatgtgtgtatgggcacgcacatgtctcagcatgtgtgtggaggccagaggacaagtttcaggcattgttctcttcttccaccatctggatttcagggttcaaattgggctcatcaagattggtgacaagagccttatatttagcctttggagcagctagtaagtcatttttcaaagtaatctcacccttttatattctcacagcaatggatgagaatcccaatttcctgacctgcacacaagcaactgttgttagtggcttttgttttattctagctactgtagtggctgtaagatggagagcactgtggctctgacttgcatgtccttagtggcaaaccattttagaatcctctcatatgtttattgaccatttgtatgttatcttgggaaaaatatctgttctaatcttttgcctatacatgtcgttttagtcttaaaagtagcattaactgttttaaacaattataaaaatatatagcaaaagttagatacagttactttggggtgaaaaattgaaaagcctcttttttgcttccccaaacatttctatgttttgaaaacccacataacttttttgtcatgttctcttcatttaaatttttttctctgatttggaacattagcacaagaaaacaattttaaagtctaacattaagaaaaagacagtaatatctaacattttggcatctttctcttcaggaattatctagattttgtggatttttaaaaatttataacacatgtacaagttcaaaacacatctttcattgttttgttttgagacaggcttgttctatgtaaccctggctgttagagaagtcactttgtagacgagattgacctcgaactcagagctctgcctgcatctgcctcctgagagctgggatttaaggtgtgcagcaccacaacagctgcatcttttattcttaaggcatcaaaagaatcttgaacattaagtgtgatggttcttatctcttctgagtgtctgcagaggaagtaccactaggaattgtgatctaggggcttcttgtacgaattacactaaaatcaatgtcctttacacacacacacacacacacacacacacacacacacagagagagaccccatccctgcccagttccagttcatttcagagcacatagtttggtccttagttgtagtttgctgctctctagagccatggcttgggtctctctgcccaaaagctgcatttttttttttttttttagttgcaacaactccccaaaagcaggttgcacaaactctattttaccctgataaaggaaccaatagagccttggggacaagatccccagaagaaatttcttttttttcccctttactcttttatagcacttgggatcaaacccagtgttttcatatcagctagtcatacactctaccactgatctacgacgagccctcagaagacactttttcttttcttccagagattctctggatttagagactgtcctggaacttgctctgtgaccaggctggccttgaactcacagagatctgcctgtctttgcctcctgagtactgagattaatggcatgcactaccactgcccggcttcagaagactctttttaagactggacagttcaattttctgaactgataaaggcgattgactctttatggtcccatgtatgtctatgaatgctttaaaacaacagcgctatccaaaccacccatccatccatacacacacacacacacacacacacacacacacacacacacacacagtgggggggggaggtggaggagatccaacctgaaaataacaaaacacaggcatatggagaattgttatgaaatgcccatcataagcccccagacaaagcagtgcaagaataaacctgagatgagcggctgggtctttaactcagagtaggggaagggtagtagagcacttacttgcctcttctgggcaaggtgctttttctgacttcctgcaggtagctcaggctgtgggactgagtatggccagtgagatgtgaccagtttacacttttccctcttctgcttcagagacttttgaggacatttattgaagatagaggaagtcaagttcctcagtgatggcacgaagccagccagtctcacaccaaatctcactgtgctgagtgaggcacaaacgaggggcaagccttcactggatcaatgagctgacatttgagggttgtgtgtgtgtgtgtgtccgggctggttttgtgtgtcaacctgacacaagctagggtcatcagacaggaaggagccttagctgaggaaatgtctcagtggatccagctgtaaggtattttctcattttatgatcattgagggagggcccagttcgtggtgggtggggcagcccttgggcaggtggtcctgggttctataagacggtgggctgagcaagcagggggaagcaagccaataagcagctcccctccgtggcctctgcaccagctcctgcctctgggatgctgccttgtgtgagtccctgtcctgacttccttcagtgatgaacagtaatgctgaagtgtaagccgaataaaccctttcctccccaacttgccttttggtcatggtgtttcgtcacagcaatagaaaccctaactgagacagtatgttatatcagtttgcataccctaatgaactcctttccttttagatggctgtggtggactgtagacattggctctgaagggggagtcagatgctctactttgccagcaaagcattcagcttctgtcccgcgcgctctctgtatttctcgccagcaagaaatcatacacgggacactcggatccttctgcaggaaagctttaatgcgtcttgagaggagagcataagcttaccagagcggagacactgagccaagaatcccgtcccctaataaaggctggcagccgccgcctgggacgtgtcaccctatgattggctgcagctcatccggccatatgacgccacggaataggcagagatcaaggaatggaaaattacccagcgcctgcgcaataatcttgtttacattcggtgcctgccggatgcaggcgccatcttgtaatggagaatgcagggacggctccctacagatccccctttttttattaattaatgataaggctttatatttttacaagcaaataggtcacccatatgttgagggatagaggcagaggttgaaccttcccaaaatcaaacattaagactgtgtacgggagtcgcaactaggctgttagcttgacccgaagcactctcgacctgtcctctgccgtttttctgggaaagggagactagggcaggcaacccttatgcaggacaacatgcctcccagagaagcctgcatattgtgcaactctctgtgcgatgccttgctctctgtgcgatgcacagccctcatgggctgctcaagccaggcactctaccctgtgcaatgagcctaggctccgggtgtgtaagagctgtctggccagcggcctattgcttaagcatagttagccaaatatcagtggaagccccttgttccaaagctacaagcgcttgggcgataaccaccttgtctctcttagtttgagccctgagcctacagaccagccagagaagcaacatcaatccgcagcaaacggctgcaccaaacaatcccacctccacccatttccttaaaataggagacagctgaagcaatccatgatgacagtccctccgtcaaggacaggagttaatctggataatagcggctctcaactcccggggagagggtggagttccgacttttgagggtccaaaggggctcttcgggtgagtctttccgggatccacaggggattctcttcatcctgtggaaaaacacatatcgctcccctggatcttatgagaataggatccgggtatctccaaagaccagtcaagagatcttttcattttaccatttcctttggccttttaggttctgagatgtggcatttggccgcagtatggccctgagcatcaatgtttagaaaattaagggtaaagagtgccatagatattgcaactcttggcaccgagggtaaggatgctcccattccctccttttgtttgattaaataagacttaagtgtgtgatgggcacgttccacaatgccttgtataaggtaggccagttagatgggtaatttccatctgtctgcagaagtgctggaacttttgagaggtataagccggcccattatctgtttttaagaagcacacaggtggctaggtaaagtcttatttttgtaatacagctgaactttcttaaacagtagcttaacttctttctgaggcagggttttttttgtgactttggagcctatcctggaatttgatctgtcggaccaggcaggccttgaactcataaagatactcccaagtgctgggattaaaggcgtatgccgccaacgccctaaacttaaaggcgtgtgtcatcaacaccctgagcttaaaggtgtgtgctaccaacataatagattagcatcttttataaaaacaagaactttacattgttaggctttgtttaaaaattctaaattgaagctctttaagtacaaacattaataaaatcaaacatttgaaaactggttttaaaaagaaatttaaattcccttaaggtctttctgtaatatatagaagcattaacattttaaatcttaactgaaaaacttgtttctaagatggtacttctaatttccatgcggtaacctttagtcaagatggcggtttaagtatcctttttttaactttagcaaaatggctaccgtcagtcatgtgaccagctacaaaatggccgtaccaggaaatagaacattttaaaacaagcatacataaattacttgagcaactttaggatatgaggcttttcccaggcatcccaggcctccaagcagtgttgaataacatgcacggccttttcccctatcaaagactgggaaagccatctgtaattttttccgctcctctgatggtaaaaaggagtcggtaccaaatagtgggggtgctgatggaagtacacccgctggattaacaggtctcttaaatttaccggggtgtgaccggttattccctattttctctccctccttctctgtctctccctcatccagctgagctgttccttccaaaaccccatctcttgagcttttagagtcattagagctatcaagatttaaagctttaaacttatttacagaatcatctaacaaattattcactcccttgtcagtagacattccaggaggtccttttttcttatttattgctgtttctcttaacaaattattcactcccttgtcactagacatcccgggaggtccttttttcttatattttattgttaggcgcgccccatctctcaccacattcggtttctgatatgtaattctggacttctttaagattgctacaacagtgagaaaagtcaaaatagctcctagtaaaagcatagaagcctctatattaacctcccacaatagcaacattcccaagccaaagtccagaaaaatcatacctctccgaatttaccaccctgcagttctgaatccgcctcgttagaggggtctccgaggtgctggaaatgttcacatgttcccgggtttcggcaccatatgtcccgcgcccgctctgtattcctcgccagcaagaaatcatacacgggacactcggatccttctgcaggaaagctttaatgcgtcttgagaggagagcataagcttaccagagcggagacactgagccaagaatcccgtcccctaataaaggctggcagccgccgcctgggacgtgtcaccctatgattggctgcagctcatccggccatatgacgccacggaataggcagagatcaaggaatggaaaattacccagcgcctgcgcaataatcttgtttacattcggtgcctgccggatgcaggcgccatcttgtaatggagaatgcagggacggctccctacaagcttcaaatgtgactgataggagaacagaggcttgttaagatcatccttagatgggcaggagaggcactgctgtcttttcaaaaacagaaaagcaaaatccatgttgtcttaccagtgcattcacagggatttggtggatcttagggcttcactggcagaatgaagctaacattcacttctagccacaaatatctcttgtgctattagcatcatgtataccatgtcgtctcccttcagaaaattaagcccaggaaacacaagcattgatcctggaagctgccactccatcagggagaagacttagacttgctcactgtggtggtttgagtgaaaatgtccacctagggagtggcactgttagaaggaacagccttctaatagtgagtgggagtccacctagggagtgggtgtggctttgttagaggaagtgtgtcactgggggtgggctttgaggtttcagatgctcaagccaagtccagtgtctcgctctcttcctgctgcctgctgatccagatgtagacccctcagctccctctccagggccatgtctgcctgcatgctgccgtgcttcctaccatgataataatggactaaacctcggaactctaagccggttccaactgaatgcttgcttagaagagttgctgtggccatggcctctattcacagcaatagaaaccctaagacattcactaaccacctggcatgtggggaaatgcctagagggaggtagcagttgcagcctggtgggacagagatggctctacctaagtgaagcatgaatggctgcatcagcaccacttctcttgctcccagaagattcctctacattctacatattatgcgttatgtttctgtggattctaaccaatgatggatcaaaaaaatcttgaggaaataagaaccaggtctattctaaacatataggggcactttttattgttattatttcctaaacaatgtactgtaattgtttatagagaatttgcatattattaattactataagtaatctagagattaactatatggagcaggttcattcccagcaccacaaaatagtatatctgagaacttcatgaatcacctgtaaatactatgccatttatataagggacctcagcatctgcattttagcatctgtaagaggccctagaatcaaccctaggatacagaggggcaagttcctgttattcttcttagacttgtcatcctttttatttttaacctatttaatgccaaatatgttcactgctgatgagaaaattgttgacattttagttttgaagtagaaagtcaaagattttacacttcaatcgaaatattttggcatggggatcccatgccctactgagataactctgggcacactctggagaactcttccttctcgggggacaaaatgtcctccaaggattggactgctgactccccagatgatttttgtggctttcagagaagtgtctcagctcacttctcttcggggctcctgggacacagggctcttggcactcacttcaatttccctctctacctcaactttttatttttaatttttgccctacccccacctcaagttttttaattagtgtgtccaaccaaatgacgcttcatttatccattatcaagatcttgatttgtgctgggcttggtagcacaggcctttaatcacagtgttcaggtggcagcggtaggtggatatccgtgagttcaaggctagcctgtgttacagagcaagtcctgggacagccagggctgtgtagagagactctgtctcaaacaagaaagcaaacaagatcctaacttgcagctttctgaaatctccaattcagggagctgaagagatggctcagtggttaagagcactgactgctcttccagaagacccaagttcaattcccagcactcacatggcagctcacaactgtctgtaacttcagatccaggagatctgacagcctcacacagacaggagtgcaatcaaaattaccattgtgcataaaacaaaattaaatatattcttaaaaacaaagcaaacaacaacaacaaaaaaccttccaactcagactgaataaaaaaaaaaatgtgcagacgctgttatcatttgcagcatcctggtgtcccaagactgagcactcaaccatcagcattcaggcaaaatgcccgatcatcccagggccttatgtaatctttgcacataagctgtgtggccacgtaatctatgtgcattcgtggcatggctccataagcccccacatgcacgtgctgagcaacctttaaacgcagacacacctgccccactccctgccttgacacggttcttccagacaggccttcacacgccccctctccctttccccactcttttctaatacaactcttcaagtgggttttgttgcatagcttgtggttcattcttgcatgcagtaaataacaggttactttagaatgctctctaggattcaatgtggttttcttgaccatccttgaaattctttttccttctttctttcctctattctgatcactcttacttctctcctgtgggcaaagttgaaaattcacctagaaagtacgttcatgtgagtctgttcctaataagaaaaaaagtgattgaagaaaagaggagtgagcgaatctggcaggaaatagattgtacaggtgggtgaaaactaggaatgcttacaccagatgtatctttcaacatataaaaacaacacaccatcaatttataaaaactctggaattccccacccaacatgaatactttaatttttagggattttatttcaagggtttttatgtacatttttgtgtaattataaacttagtgtatatgcttttattttggtagaaatttgttagagaaaccttagctcttcttcatatttcttaagttttggaggaagaatgttttagggttagaattgtatacctgttaacattggtcctctagtattcatgtcgtttctaactgaagaatgtagacatcagtgggttttaaagagagctgggataatgctaaccttgggcaaagaaggatgaatgaaacagggtttctctctggaaaagcttcatgctttctagttataaggggaaaacaggaagacactttggggtattgggaatcatacaggcttttagagagcccttacttttcaatcgccctttaaactgtgccactctctatacaacagtaggcagttaagtatcttagaatgtaaacaaatataaggacatttcagaccatgcctctgctactctggtgagatagaccaggagtctaaaaacaaaaaagaatgcagacttcaccagtgtaggaacagaggtaggatgacaaggtaaattgttagtcacttttctgttgctgtgacaactaccatgattaaaagcaacttaaggaagaggctttctttcagcttgtgtttccagaaggatagagtcctcgtggtagggaaggcatgtcatggcagaagacatggtggcaggagcaggaagttggctaagtaagtttctatccacatacaggaagcagagagaaagagcaggaagtggagtgaagctttaagctctcaaagcccaccctccagtgacatatttcctctagcaatgtttaaccttctaaaggttccttaacttcccccaaacagtggcaccaatgggggaccaagtgattaaacacataagcttatgggagacagttttcaatcaaaccaccacacaggtcttatgattcctagttcaatgttcttttgaaacatgataggaaagaggaaggagggataaaggggtggatgactaggattaagaaagggaaaaggcagagagcctgcacaggttcaagccagaaggggtcccagcactggaagggtgaagtggacccaggcttctacccctaacctagaagctatctgtaattgacacaatgcaaagggaaaaattagttttatccaataaattcccattgagtatattaaccacactttatgttaggctccatgtccaagaatagttagctaatacaaaaccaacttaatagtctttttgtagactttttgtctcatattgctttgtttgggcactttttgtcttattgctcttttgctcatatattttagtttctggtttttttggtgtgtgtgtgtttcttgtttttttcttatttgatttttttttaagagagagagaaagaaaggagtggagttgagtgggtgtggagtggggagaatctgggagggtttggcaaaggggaaaagcatgctcagaatatattgtataaagtaatttttcaattagaagaatcgagataaaactttaaaaaggaaatgacaagaggaagaaagggaagaaggaaggaagaaagggaaggagggaagaagggagagagggagaaaaggaggaagggaggaagggagtgaccagagcaattgaaaagagtaaaggacgattaaaggaaagtagacaaaggatttcaagacttggctaatcttaagagtgaacttgaaattagagaacactaggtcctcaggggaaagcaggcccccacaattagaaaaatcaagccatacaaaacatttaagcccctttgtctatttagaaattacatttccatgaaaagaaggcaattctagagttgtgaaaggcataggttcaactgtctgatgtcaatgggtacaaattccagtctttcctctggattcttgtttgtttccctagctgcagcatccatgatagatggactacacagagttgatactaaaaagaggtggaaataacatagaacttccaggttcaggccttaaaatacctgacagtttctagtttctctcttctagacactggatgccgtggaagaagtgtgaatgccttgctgtagagtagcccaagtcagccatatggaagtaagaggttatacaaatatggtggaggactaagatacctaatgttccagtgaaaccttccagcaccttgcagctctgtctagctgctagaggaatgaagccaagtgacttttcagattagttcatcttagtgtccaattagtcagtcatcagtgttttggggctactgtgttctagcgtggtttgtggggcagcagtagacaaatgaagtagtggcctacaagaggcagttccttatttgttatgaacctgtggttcgggtgtatggtctgttgatctggaccaagcctgactaagctcgcttggacttgtttgtgcctctgaaaataatgagtgctggctagcaaagatgacctccactgtgatgactcagctcttgctcgccagggtctttgtccagcagcaggcttggtaatggcagaaccccaggagctgatgcagaaatgcacagttttcaagacttccattgtatcatgtgtattcctgctttattggccaaagtaggtcgcatggtaaatctcaggaggaaagactggctaaagagaagttgtcaattggggaccattaatattatcaaatctgctgaaagaaacacatgcatgtctcctgtgtaagtgcagaattaaataataatagtaagactttgtaccaagatctagaatcaactggaaaaatatttgaaattaagtaagatatttaagtgagtattttctggtttttaaataagctttgatattttctggccaagtcactattgctaatgacattgatgttcttttatttccagtagaggataactctcctgaatccctactggtagaggtagaatcaggaagaaagttttgtctcacactgcacagagctaacactgcagcatcaaagctcttgtggaatttaagagtctggcttcacagagttaaactctaaatgtccaggaggcagtagttggccttgggacttctctacggaagcccattctgtgattacaaaaagcagtctaggtgctaatgggaaaagcagctgcgtggaggaggcacacaactggggtgtctgaatgtaaccccatcccacttttgatccacttcgatttcacttaggtttggctttgcctgttttcaaatcccctgaggtatttttactgacatcgcctctctggaaagcaaattgacttcctgctccttgaatttcagagtggaagtctgaggagcaggcaaactacccactccagatgtcagctagtctgcactaagagcagtgtgatgctgccccctagacagtgattcacagcaggaggttgcaaggttctttgatctttgatctgttcctctttgtctgctgccccctccactggccccatgttgaactctgttaagccagtatctctgttactttttgctcagggtcttagggtaaggaaaacttttctcatctgtgagttactgggtgtctttgagccatgatttttgttgttgttgtttgtttgttttccatctgaaaatcgtgcaagctgggtcacatatcgtgcatactgtgtgctttaataatgtcaggatgccaggacccaagtcatagggtcctgagtcaatgatgcccttgacctcccgtagtggtcagacacacctggaagaagtacactgggaatatagtcaaataacaattcacatctatttaatttgttggtttgatttcaataaaactttaaaataatgcaacttttgttacaaaagacttattatgatccattctaggctgattccaaaccaggacaaactcactggatttggaggggggcgggtaaaagatttcaaaactgcagacaggtgttctttacagaatctcaaggagtgtttccctcaagcaagaatcatcaaatgctgcccccgccccgaacgtgaggttgcaaaacaagtgttttgtttcgtttgagaaggggaaagtggaatgaagttacgaagctgaaaaatgccatttgcttcgatccgactagaaggaattgctaccttcctgtgcctgctggagtaaatttaattttggcgtccaggacagcatcaccctaaacgcatctttagatctggcccctaccctctttgcagctatactaacctagttgagattccaggtacctccagcaggcgcgccccattgctgcacatttgcggggacccccttaccagcctatccctacctgttggataggtctaccttccttaaagcacctgctatccttagaagagggacagctgtggtccctttctcgtggagaggggcagcctgtactaaataaaattctggctcctcgaggaagaggagtcaagtcaggcacagcctggttcagtggcctggggcagggacactttctaccccaacacagaggtccgcagtgaggcttcaaaacttcgagaagcgcctagaagccctggagtttcggaggatcctgctaattccagggagacgcttcacctctgccccacgtccaggttgcaggcagcagcacagggtgcacagtccccacgcacctactcgggtgcttggtcagaccgccagccctgtgactgctgcaaaccggtctggcttccctgcagggcgtgcgggatggagcagggggtggagagaaaaggggaagagcctgggtggctggcgggcggggcctgcagcctcccggagtcgcggccgcctcgcagcctgctcgccgccagcctcgctcagactccggcgcgccttgcggggacccgaggaccactcctcggcttccacccctgatcttgcctcgccgtgacgcctccggctgccgagtccttgtggtccgcttgccagtctgccagagagagaggagcggcgggaaggaacgggaacgcggggacacgcacaccggccgcggcgcgcgcgcattgcacactcgcagccgcgcgtccccgtcaccgcgtgtccgagccgagtgtggccccgcggcagggcccggcacctgcccgcctccggctctgtcccggctccgccccgcctgctgcccgccgcagccaccggggaacccgcgacatcccgacaacttgcccgccgtggcgcaactggtcttggctgccgaggttcccgcacgccggccgggggaggtaagttttctgcgcgtccccggcaaccctgcctacaccctctctagccgccgcgcctgaggctctgtgtctctgctgagacctgacctgcttgctctccaccctgccactttgtctgagctgtgctgggggtgacgtggagggggcgcccgtggtcaccgaacctggaccttcgttcctcggggggcctcagctgtgcactccccatgggcacccaccggcttcccaccccgatccctggggtggcagtgacacccgctgatcactcctgctcacttacgccggagccccctccttcgtttctggagaatctgctgagtttggatgcggtgggagaggtacccctgtctttctcccctgctgctaaacagcgatgaacttgttaggcgacccagggatgtccagaggggcttgcatgagtcggtgttctggtgatttctgtctctggcgctgatggaacaggttgaggtacggttccagcctaaaaacagtcacggacttttatgggtcccctctctccactggcccaggcaacattatgcttcagcatctggggcggcgggctgggagtatggggcaatggggtgggagagtgctggagttggattggccgctctggtgccaggagtcgtcagaactgaagacaacaaatgtctgcttatctctcatctatgcagatgagcatgttctcatttcttacccccaccccccaagccggctgtctgctgtgcacagcatgcttgggtagaaacctgtttcagagaagttgtttgggtaggttagtgaattttttcctcgtgcctgctgaaatcagggcttcgaacaaggatctgctatttactgtgatgctatttaaaggaaacgcactttgaccctccccccccaagttacaccccctgacactgcccctagatgacattctcagccaggtagaagtccctgctgtaaaatgaatggcccataaggactgagaatttgttaaccttacctaaaaagtggtctgactctgttctcttgaacttcggcttggagggccccctttgaccctcttccggaagacttccctcttgttctgtggagagactgcagtgtttttgcagttgttggagtagatcaaagtccaaggattggttttccttcgactccaatgtgatgaaataaagggggttcttggaagctttggtcagaaggctacctgctgaaaggaacccctgggggggggggaaaccttgcccaagaagtacaagattgagccttaagtgtcacgtatgatctctgagatgacgaaatgctggttgtatgtgcaaaggtggagacccctgaggacggataggaaatgcagtcagtctgctcaggatgtgtgatgtccatcttgggaagggaagctgtatggctcttacaggtacagcagcattgcattttgtccacactaagaaaactggaaggactgaagaactccacctaatatttgcatccacattttgcagtttttaaatacttttcagtattctcactgtatttttaccatttctgagggagatgagataaaggtgatgaatgcaaatttacagatgggggattctgggatttatcacggtgacaagtagttgttagagtcccagccagtttactggtcttaactcagagccaacactgtccaggaagtcttgggttttgttgttgttttgctttctttaatgagcagacttgtcttgccttcatggtggtcagtacagtctcattgtgacttaccactcacttattgcagataggaggaaactcagggttgggcaaccatgggaggtgtgcatcgtttctcctcaaagtggagattctgagaagagagttcatctaatctcctggcagcttggtgctttgtgttttctgtcattgtcccacttctgatcaggatgaggtcatgctgttgttcagcatgctggttggtggcctaggctgtaactccaacacagcttttgtgccatactataccatctccaaacctaaaatctttctcatacaaactaaaaagcatccatggaattctgtttctgttgtcagctttagcattctgtggtgtctatctagcaatgctacattacttccttcaggtccttttcttctaaagtttaggagaagagaaatgtccaccctgtgtcagccaagggggttaaccagctagccattgattctcgcttcagtttactttttctgactttgactgtggacccctctatggagggaaagaaaattagaagtgtgtttgaatttatcacctgtgctctttagtgcttctatttgtctttaaagtattcagcgtaaagttctctcaggtacaagttggtttaatactccaacagcatatgcacacatttatttatttattcacttaattaattaatttgttttttgttttttgttttttgtttttttcagagacaggttttctctgtgtagcctaactgtactagaactcactctgtagaccaggctggctttgaactcagagatctgcttgcctctgtctctgcctctgcctctgcctcccaaatgctagaattaaaggcatgtaccaccaccttctggtcttttttgtttgtttgtttgtttgtttaagctttgtggttggcatgtagtaaatactgccccccatggctgttaaattaatggaggtgaatgaaatcattcacaagaaaagcatgctataaaatatgtaaattctcacatgtaaattctcagcacggaagataatttttcctgtgagaggtgagatgtgcattctaaggagcccatttttaatcacccatgttgtttcccaaattcattacattaaaaagtttttcttcttcttcttcttcttcttcttcttcttcttcttcttcttcttcttcttcttcttcttcttcttcttcttcttcttcttctgccatctctgtcatgttctttttcatgcccttctacctcttgttagtaacaattgaagagctggcttaaggatcctagaaactgacttgtgtcgttttatgaaagggcttgtctagagatgaagaaaccaacctctctgtttcactttggcggagggggtgcgggtggcagggagggggctgaggtacatttcagtgactactaacattggctcagtggttttggaggagaaacctaattagcgaaaccaacctagtttctgttccctttaagaattttcttctctttacatttcttcctataaacaggaaaagtgttttgttttgttttatgtaaggaagaatgggacagcaagcacagtggatctaaaatactgctatagaccttgctgtttattaagggttgggatacatttccttttgataaagaattcaaacattaacttgtttagagatgggccatttacaggtatgaatgctgaagagttaggaagtaaactgaccagctcatggtcacatgggtgctgggccaagtccagagctaccgtagcatagtcaccgaggtttactttccaagttgtgccaggatttacagtgagggtgcagttttgactttaaggaaccatagagatttgctgaaaacttctatttgccagtaatttaaggagcaggtatatttttaagtgatttcctatttatctttttaaatattattgtctaaataaatgccattatagagaaaaatgtccatgctcatccatatgctattattctcatgactaagatacatcagcagattcataattaatactttgttccattgagggcttgaagaaagggacttgtttgaatagaaacaaatgcagggtggttttgtcctggtaaataaaggcagccactaaaggtggccctgtcacccagccagtaaaatcataaatatgcatacatttaatttgcatttgcatttgcttgtactcctgttaaattgtaattcaaagcagaaaattaattgtgtgtgtgtgtgtgtgtgtgtgtgtgtgtgtgtgtgtgtggctacagccttccttattgttctctgaaaaacatcaagtcctaaatgtgttatttgttacaaaaaaaccatttccctttgtgtggaatgcattgactggagttggaggagtcctttttaagttttgaggagctgcccagtacattatgtagcccagcacagccttcacttgtggtttatctttgaaactggaggtgtttctgctgaaagccaggggcgggagacctaacatcattttgtcttactcatttttccgtgttttttgttttgttttatttttgtttttttgttttttcttcaaatcaacctcaagtttttttttttttttttaaatagctgctggcattggtaagttgtttttcctttttttttcagctatgtcctactaaaaacaaacaaataggtcaacctcaattttgcacaatttattctcaacattatcatcttgtgcatggcttcatcagaatgtacaaaggtaaatgtatgaattctcgtcaagcgagattacccttgggatgatttggaacacagacaccgggatagccacagccacatggagtgtgaagtgcttaggcttcctagcatttatgggactgagtagacaacgtgaaatagtatgtttgggagagtttatacaatgggccacctggaaatccttgagatgcctgtctctaatgtattttagaaaatcagctgtgaaactgcaatgaaattgaaagcactgcttgtctaaccctagaaatgggtgtgcaggttttccctggagcctcaggtgaggattctaatggcaagtgctgggagcctgggagatatataattaccttggggtgaaactaaggtttggagacagaactgtggaaagttcatctatttggtcaagaaaaaaaagggggtatttaagctacatccagtactgctgactgatgagcttgaagagcagggtaaagacatagctagtcatagaaatgtgtttctttgcttcacaggtagactggcacaagaaatacaatgagtggaatgtgctgcatgatgggtttcttcctctttttctttgtcttcttctttgtcttcttctttttcttcttcttcttcttcttcttcttcttcttcttcttcttcttcttcttcttcttcttcttcttcttcttcttcttcttcttcttcttcttcttcttcttcttcttcttcttcttcttcttcttcttcttcttccttctccttctccttctccttctcctcctcctcctcttcctcctcctcctccctctctccctccctccctcccttcccctcctctctctttccttttgagacagggtttctttgtgtagccctggctgtcttggaactcactatgtagaccaggctggccttgaactcatcagagatctgcctcccaagtgctgggattaaagttgtgcaccaccaatgcccagcaatgtgatgggtttctcatgtttaatttctttgttgttaaaactgtgcccaccatcatggggcctcttcgagggagtatgaagtatgttgcaggtgctaggcaaatatttgtcagtgaaaaaggttagacatcctgttttgtttatgtttatattcttggatttttttttagggctgtgacagatggtgaaaatttttaaaatgtgtcaaccacctccaaattaatgtttaaaatctcagaatgtttcttaattattccagagccattttaggaataccaaccagacagctcttgagaacaacacccgaagttgacctctgactgccattatgcctgcacacatgtgcaccccacacatgaacatgcacatataattgattttatttcaaaatctctgatatatatatatatatatatatatatattatatattataaaactccacagaagcatctatatatttggaatacttggtaagcactagatggcataatagtgaatttggatcagggctctgagatgagagtgggcttaaagatcatctagcctaaaagactgtcttgtctgtattgttcacttgtcacaatgggtatttacatacttgtttcacttgacccaggattatacattccttggatatatacagcatggttctctagcactgtcaatctagtggctgtttcataataggtgtttcagtaaatgtttaaatgaatgagcaagtcccaattacctcctgagagttggagggacaccattggcattacatcactggggcttacattgttactctgaggcttgcttaaagttagcagtgtcaactgcactgggctaatgatgagcctccaagttgaatgtggatgacaccatcccatggactgagatcctagattggacataatataaacggtgaaattgctgacaggaagctccttctgtgtgagctctgtgtgtgtgtgtgtgtgtgtgtgtgtgtgcttgtggatgtgtgtggtaggaggggtgtttattacttttcttattactgagacaaaataacttacaaaaacaacttaaagaaggcatattgggttacagtttgaaggtacagcccatcatcatgagaaggcatggtgatgggatcttggggcagtagtcacaatgcatatatagccaggaaggagagagagagagagagagagagagagagagagagagagagagagagagagagagagagagagatgctgcagagagagactaacgctgccgctcagcttgcttttagttactttctttctccccttctgattcaggctgggacccagatgctttttagttaattgtctttggaaacaccctcacaaatatcctgaggtgtgttgcctctgaggtgattctaaaccagtcaaattaaaaatgaagattggctatcttaagtgccccttgtcactggtacacatcacttcagatcatgacattccatctctggctccataggctcctggccaaaccatactgcaaaatgtattcatttcaactcagaactcctcagagtcttatatttcaacactgctcaaaagaccaaagtctcttccaaaactcacaacagcctcttaactgtgtgcccttataaaatgacacattgcatatatccaaaatatgatagcactaaataatctcattctgtaaagtggtgaatgggagcatagtgggggaagatcagaccaagcaaaactgagaacaagcaggacgaatgccacattctttagttccatgtccagcacttagagctcatggtagtcccagtgttccaacagccttcagtcactctacactcctccagatctgccccctaaaccagccccacactgtgcctacagctttccctagtgaaccttatggtcctgacacatgcgacattctgggatctccactcaacttgggttttatcttcacagcttcacatagtgtcctctcagggtctccttaggagaaatccaacatgccatactttacctggcctcagtggccttctccaactttggtgcaaacttctgtgactccataactcttgatatttcatgttcgtcaatccagggccatatggatagtgtggccaagttctgctgccagttggtgatgccatgtggcctcctttgtcacagatgtagtggtttctgggtacctggggggccgaatctgggaaaaacgcttccccaggtgattatttcccagcagacaaaacccccttggtggtattttcatgaggttcagtcttcctcctcttgactgaatttgattgatttcttttttctttttgaatctggagccttcaatggaaagggagaggatcttgccttcaaggcagtttctttcttgccagtgcaaagtgggagggttcccttaatttaaggaaagcagttgctttgtcttgaccggtggttgtcaacctgtgggttatgacccctttggggatccaatgaccctttcacaggggaagcctaagatcatcagaaaacacaaatatttacattatgattcataacattagcagaattacagctatgaagtagcaatgaaaataattttatggtcgaggccaccacaacatgagaaactgtcttaaaggatcacagcattaggaaggttgagaaccactggcctatgctctcctgatccacaactttagatatccattcactcttttccgtactagtctttgtgatttgaattctcattaaatgcttcaataaatttagtgggtagtgaccataccactgcctgagtattatgccatcttgaaatttcccccattaaacaacttaatccattccatttgaattcagactaggtcaaataatcaggggatgggttaaaagcaaccagttttgtttatcattgttgttgtcaaaatgtaacattattggcctctagtctgtaatagagtttttgattgctgacttggctaaagagctctgtgaagtcccaattctgactgtcactccagtctcaggctaagcagtatattctgtactgtttggtctccagtcctgctgggcaccagctggttcctgaccttccctatagccctgtgtggctctgtctggagtgtggccttgcactgagtgactatgtgttggggtagtcctaaggctgctttggaaggaggctgtcaccaccttcccacctgttctctgggaaggattcagtgccgtgattactgaactcagtgctcccaagaagccctcagcatcagaaggataaaccatacatcaggagcttatttcccccatggtgtccttagcagtgtagtgccagcatatataaaagtgttcaataaatacatcaaacgagtagcattgctttcatctctcaaaaaaaaaaaaaaaaacaaaactaaacaaacccaaacttctgcaaaatcccagcaaagagaggaaatgcatagatgccatgcatgccactgtacattgttaatactgcccgtggactttctccacctttctactgcttgatggcataactgttgttttgttgcttttctgtaatggtccctgaagtaatcacccccaagaaaggttgcccgaaagtcatatttctaggatgatgcacctgggacaacaaactgactccctgggatcagggatgaagggaaggctttttattatagacccttttaaaaacgctgaactttgaaccatatacatgagttaggtgaattaaagttgcaatggagggaaggatgagaaagttggagattcttgtgatctggagaaaagaagatggaggtatgatcaggggtgggaaagctggcctctccaaaagttccagtcttcaaggatacagctgtggtgatactttgtttatgatctaacacataaagcttgcctgaagatccgagtgcaaagctaaccacactagtcagccctagaggccaggcagtggtggcacacacctttaatcccagcactcgggaggcagaggcagatggatctctgttaactcaaggctaccccgagctacaggaaagtgattcagtctaatgagaaacagctcacacaaaagtgatatcagcacttgggatcacacacctttaattcccacactagggaggaatatacagtgagaaggagacaggagctcagtgcagtctgaggtttggtggagacagatgcagtctggagatgcagtctgaggacaggatcacccctttggtctgagcactggtagaggtgagaacattctagtggctggcctatttgcttctctgatcttcagctttacccccaatatctgtctctgagtttttatttttaagaacaattggaattcatgttatatacagctgttactaatgactgtgcacaccaaatggacgtcaagtggctcatagtcaaagaggattccacactctataacatgactctgaaagtcttgcctgtatgctcccatgacaaatatagcatttaatcaaagaggaaaaggccaatgttgtctgcatctatagaagcaagcagccattgaagaaagtgttagatgctaaagcattcatcttgatggcctaggtattttccaggttgtaataaagcacaggattatagactcctagagaactgataagatgtcctgacctgcctggcctgttggggcagatgtgcagtcccagctgttgggttgccaaggcaggggaatcataactccaaaggcaaccgggctacagaataaactaacagacagccaggacaacttagtgagaccctgtgaaagtcaacgaagagatagccacctaactcagttcagtctgctgttacaaagaaccaccgaaaaatggcttatacacgacagaatttattcctgatggttctaggcgctcaaagtccaagatcagaatgctggcatggttggtttctgggctgaggctgaagagagctgaacttacattatgcgcttatatggcagaaagagaggtggagagccttctgaagattgctttttttaagatttatttttacttttaaatctctctatatataaaatttataatttgcatatatatatatatatatatatatatatatatatatatgttgtgggtatgtgggtatgtggacatgggtgcagtgcccacagagactagaaacattagaaccccctggagctagacccatgggccatcatgagcttcctgatgccggtcctaggaatggaacttgagtcctctggaagagcagtatgtgcttttaactattatgaacaaaaattcccgaaatgaagctgtgtcttgctgtgaaggaaatccccctggaaggatcctgtgtctgcagagactgatggattgactggaatttcaggactgtggagagattggaattttgtagcttcagaggcaaattactttatcttggactagtggaaggcttgatttcttgccccactctgtatctgaactgacacctcatgataataaataataaataaaaaccacttagaagtattaccttagcagaacactggctcccaccaatccaagagctaagaatggcatcagataacattttagcaccatagaaaagtttcttataatactataaatccacatgaaactgcttccatgttggaacctgaaatttggagtaacctaatttctatgttcctgggccagggtcattcaaaatggttccagaataaactatctcttaccccctttaaggtgacagctattggatttcagcctaactttgggggaccacaggatttcagtctgttatggcagccaatgcccttaaagaatcacagcctatgatgaatcctaggatatacacagctatataaataatacttataatcaaaacaatggttttgtgaaacagcacttccacagtatatgaaatatactgtgttgttttctggaacgtttcctccagcctctgacttctaataaatactgaccatgatacattagattggcactgtctccattatagggctctgtggtgtagaaagcccgagtctgatctcttgtcactcctcatgctgtctgtggactctgcctcataactaggactctttgcatgcatgtgccttctagaagatgggggggtgttaattaccatgtgaagactctccccataaagttttcatttctatcaggaaggcaaggtgagtcatggagagtagacacctgttggaatttggaccttgaggagagtgggttataaagccaccttgtcacacaggattcataagcttcagcgacaaaccacatctttaaattgagcatgtctgtttttttcacataatgttctccctcaagtttatactatgttattttttagcaagaacctaaatactgtttttttttttaaaaaaaaaaaggaaaaaaagaaaaaggaaaaacaaaacaaaaaccttatttaaaaacatgtcaaggacaatttgggagtggttttttttttttttttcctccatctgaacttcattgatgtttcagccattctaactggccaagtgagaacaaaatgaagagggatcgattgagggaccccgtggttcctcagcccctttgggcaggtggctttacttctagaatacatttgttatttgcagagggtttgtctgtcccataaagtacagcattggttgcggccattttcaaatggaaaacttccacagagttgtcacgtccttttttcatgtctttgtaagtctgtgcagagcagagcgaagttttgatgggggatctgtccagagatggggctcccacactcattggccccattttgttatttccaaaacttcttcctgatttcattcattttaaggaggcgctacctctgtggcttgaaaagtaagcccaagagacagttagcttttcttcgtattgtaacaggatacccaacagaaacaactcaaagaagatttgttttggctcaagattaaagaaataaaagtccaggacggcagggaagtcatagtggatgaagcaggtctgtgacaaaggaaacttgcagtgtccgtgccgcatgtggcccacccaggaaacagagaaagctagacccagactggaggcctatgttgtccagctagaccccatgccaaaggatctgactccctccaaacagtgcattcagctgcagacgaaacatacagccctgtgggggacatttcctatctaacctgcaacagccttattcattgtttgctaggctgttgagacttatgttgtgatctagggactacctaacacccatgttatctaaaatgtgactttactttgaaattgttctttttcatttttaaagactctctctctctctctctctctctctctctctctstgtgtgtgtgtgtgtgtgtgtgtgtgtgtgtgtgtgtgtgtgtgtktgtgtgtgtrygtktgcgcgcgtgagcgagtgtacatttgaggacatacaggtgcccaccaaggtcagaaaagggcatcaggttccctggagctgaagttacagctccacaggtatgagctgcctgatgtggttgctaggaactgaactcaggtcctttggaagaggaacaagtgctgctgactgctgggccatctctccagccactagaattactttttccttgagagagaggggggggggaatgacccataaggggctttagagagaggacctcacaaggtctccgctcagagcctttgcttttcacttagttgaaagggcggtaacaaacacactttccaaagtacttccttttaaagccgaggcgggcagcattccctttttattttctatgaaatattgatcacatgtttgctactttatctaatctaaaacaagatttcataaatgtttttatttcacttaactgtagtggtagaaaggatgggtattttgatgacagtttcattttcagtttttatgtcctcagaattatagattgacaagtcgtctttctcttttccttggagaaattgcagagaagtctcccaaatttcctgtctcctatcagcaaacctctaacaaagcaaggaaaatgaataatgaaaaactaactttaagaggctgtaagcagatttttctaagaattcatctttgaaaagaagcaagcaagtcattgctttgatgagttattttgaaatgatgcccacttattgttttccccaagatatatggtttacccagagtggtgagggtaaagggaaatggaacaagtggcaattctgcttctggtgccaagagaaacaggcctttcatttatgtttgtttatagaaagcaaattggaaattcagcttgtaaggtacgggtacagttgggtttcatcatttgttaagcaacgtcttagaagctgtctcctacacagtagttggtaacgtaaacacgatgcatcatttccttttgtgcaaactttgtatgagggatagtcatttccacacacagcagaacttctcgaagcaatttgtaacttagcgttaggtaccctccgaatgggttgagcagcttcaaagttggtggacactctgcacattgcctctgcctttgtttctacattagtctgcatcattcaccgaatgtcaccttgctgtcactctctcactcttgcatcaccagtgcttaaaatagtgtctagcccagtggttctcaaccctcccaatgctgcaaccctttaacacagttcctcatgttgtggtgaccctcaaccataaaaatatttcattgccacttcataactataattttgctaatgttatgagttgctgtgtaaatctctgatatgcagtgtatctgatatgtgaccccaaaagggtcacgacccacaggtggagaaccactggtctagcccaaggctggcctgcagtttgtgtttgctgaacccattcatttataagctgtaactttgctaatctagtttactatcttttgaaattgtgaaccatatggcttctagactgaacaccatttcaagtccttgtcccaataagtggccttgtgtcatggcaaattttaatctctctccatctcctaactttttttggtggggagctgctgtatttgacacaacttcatgaattcacacatcttttttggagactgatatactctcaagaccctgagttttatcacaatgaggaatatgtgtgtgcgtaagaactgtttgaaaaccccagcctgcctccttccccaagctcagagttttcatagttaccatcttggcagacttagaaacttgcagccatctctcttctgctcacccctggcttgcatggctgctaaccttaataacacagcctctgttctcacctctttcctataccgacccctctcaactgccctatttagcagcttcccaagtagcttcaaccaccccatttttctttgttcatttttgatacttgctcctggagctttagttttgttgtcctgcactccaaacccttataaaaatgttttagtttgttccatagaaccatccacagtctggtcttacatgactgttggtcatcttttatcactgttgtccttatcataggtatactattggagcagtgacagcagctatatagcgcatgcaacacctaggatatggaatcgtagatcttggtgttttatagttgcgtactttgagaatgaggggtgtgagaatggatggaattagataggacatggtgtgttggggaccctccacggacacattagctgtgccatgctgaaagctttctctctgaagacagtggtgcaacaaagaagagttgtggacaagtgatgagctcatattttcaatcagtcatgtgagcaatgtagggaaatgaatttggaaggcaataagccagggacagagaggccaacgaaggacctcagtaaaggtagtgggcacaaagaaaggggagcggatttgagacttggaggcgttgacctactaagatacgaatgttgagggaacactaggagtcgaaggaagtgattctttggtttttagctgagtgcttggaagagtggaaagaaatgcttcactgagaaaagtgtgtggggtggaggcagcctggtggagacaagaagtttgtaatgatgggtaccactttgcatgttcaagaggcccaggcagggtgtggctataacaagagtgctaggaaacagtggctgtggtaaggtacaggttgtgggcattgatccaagccatgggagcagatgcaattaagacacgtgcaggatctccaggtggagtcttggagggtggaggtaaggaaagatatggtggtgccttgatagttagaatgtttgtgaattgtcaaaggcttgggattaataaaacttccctgaaaaggtgtgtgtagcagagcatactgtcctctgatcttaatttgcaatttaattacctcatatatcggctcagactcttttttttattattatttctgaattgccttctattttcttctctgtttgaggaaatggcacctaattttcatggtatgatgcatattcagttgttctagaaggcatctgggaccccactaatctgaatacctacttcgccagaagcaatttcttgagcctactttttctttagcattcttctttttgagactcctgaagctctcccctgaggaaagcttgtcaccgccttgaagcttatctctttaagcagactcaagtcctgacgtcagggaccacatttttgcccgctctctgttcccacccaacttaacggcttctgcgccttctacaccctagacactgctactgtgttttattgattattttgatcctcctttagaagaacaaagggaaaatgggaacttaaacttctgtagggttgtatcagtcaatatgccttgaactaagttgaaaacgcctgcttcaaggatgtttgcaagcttattgttctatttcttactttaaaaaaggaaaaaaaaatgaagtattaagaaggtccacaaaggccaacgtcaacttattgtgacttgcctttattgttactttagactcaaaaggaagaaaatgtcttttaacagctcttttccacctgcttgcaaaaggagtttatctcttggtgtgttagggcaagcttcctgtgcttcaaaatgacatttgcttacatttgcccaagttgaatttgaatgcagtgagcactgtggtcagagaagcacaatcctgactcattcggcctttatgctgacactttgatgacctctggtcaagtggcttgaccttgttcctgtctttttcttcttttcatcagtaaaatgaacatctaaacactggctcttgagcttgatcaaaggcatgatctgttcgagaagccaatggagtgatggcctttgagcttctcagaacaaaagtgtcacacacattacagaatatattttatagggattacagaaagaggtcatgctccggacatcatttttatagccagggtggggaagcacatctgggataagggtccttgtaaaaaagactccttctttcttagcccttgagcccaaggttgggaacaaagcaactcacctaagactgcttaggctttgagttgaaacacaccaccgatatagttgctaagaagaaagtaaaacttatgcttacttgttaaagaaaaggaatgctagtggatagccattaatgggttggctagggttgagagtagcagatgatgctaccggtactaaataagtctcgacttcttggtgggtataacttatcacactgcagaaagcccagcaccaggccacacacacaaaggtccatgctccttttgaggtgagtgctacttttgaggttcattataagatgctctcagaattcatgcacctggggaatttttaagttgtttgaaattaattggtttcctcaaatgccagtgaaaattccaatagaaatatgacagcccagtgctatgtgtcagatgccagaggtatcggactaaatatactgacatggctaacacctgatcaaaatgagccaaaccattttgggtggctgaaacaaaaactggcactactgtgctcaaaagacacggcatctcaagactctgcatgatacctttgataagatgactttgagattggcttcagtgactattgaattcagtgactattgaatttccagcactgttgtcaagttcacacgtgcccccacctgtcagagctggccacaggccaccactctcaagggccttttagaacttccaacagggccatcctcctggcctgccagctgaaggacctcacagtggacaccggtcgagcctgctcctgacgtgttctccacagacaggattcctcagaggaaacttgctgcatttcccccacaaccattcccactcagtgagatgtctaattacatgagattaccatcacctttatcttagcatggcattgtaggcaatgtttgtgtgaataaagcaagcataagatttggaagacaaatcttatgtggacatcctaattgttaaacaccccacaaccactggctatactctcagcattcagagtaacacactggaataggaatctttgggtctgaggtactggccttggctctgttaatatgacactaaaatctgaattgttggctcagcctggaagtgagtacggtggtatcatcatgtccatagctggcctgtttctttgtccaaatgtggactgagtgtagcttgattctgactgcaggctgtatcacaggtttacttaacaaagtcaaagcacagctgatagaaagtgagctatggaagcagagattggaaggcagtggtggtaatgtgcccatctacccaatgggaagaaagatgtaacagttaaaagctgccagatgcatactatggcacctgcatccctgatgaaagtgctggggatttccagatgctctgactcttagaccacacttgctatgatgagttttattcactgtctacatcttaatagatatcagagaggtatctgtggttaaatcacattctttaggagttaaccatgcttaccatatttctatgtgtttacttgtcatctttaacagctgcgttctcattatttatcaagtgagtttttacatcagtaatcccactgtctgtatatgaagacagttttactatagagataagcagaaacacagagagacttggacttaaaactacagagttactgaacacaagaattaaaataacagtatgttaaacttagggagaagggcagggccaggagaaggagagtctgcaatgtgaattaagccctagggatgtaagtatccatcaagaagtttgaaataatcaccaagacccaaagcataaaatttaagagcagctgtcttagaagaatggaattaatagggataggagaagttagagttggtccccatgaggacttttgatcactgtccatgatttccatcgtgaaagtaaagcacaggcatattggtcattacagcacagaggtacaaatgacacaagattgctaaaataagtatatggtagaaactgaatgttaagaaataaataccggagaactagtttgtagggcacaatgtaagccatgcctgctagaagctggctacaggtgtgttttaccatgcctgtcagggtgtggtcaaagtgaggtcaggatgacacatgatagggttttaaggggctgcaaggcacatgggagctttttttttttttttttgccccactgctttgctgcccctagcacattctggcttgcgtttggcgaatgttttgtttatccaaataaagatatcttaaccttacaaactacagatcttcttatacaaactacggatcttctcataatactagtttgtgattaaagatgggaaagaagaaagggaaggagagagggagggaggggctacaatgacagcaccctggcgatgtgtgcccaaacttatttgggtgcctattataatctaggcactttctaagtgatgaccatgtattaacttacttcatattcagagaaacccttgagagtagatgatatcatcactattttactgaagaggaagccaagggccaggggtattaaatgttattcaaaataatgaagtcagatttccaagtcaggtgtacaggtatataaccatctctctaaggtaggctgccctgcatatctcatgataggctggtgactggtatgcctcaaagtatacacagtgggtgtttcttgatcctaagatagcttaatttcttttgtgaggtcatcatttgaagaagtacttagcatgtggccagttataagccaacaaggtatttaatgccagttttcacagtcctgggcactagcattattccaggtggggaggccagtaaaacagaaaagtaagtactctcagttgacagaagaaaaggaagcacacaccctcagtttcttttacagagcactaatgtccttcatgaggattccattttcagttacacacacacacacacacacacacacacacacacacacacacacacacagctggtagtggccacacatgtaaattttaaggagaaacaaatatttaagttataacatagactccaagtgcagaggtcaaactctgcagatacaagagaaagcatttcaaatagaaggcatagtaagtgcaaagtcctgaggcacaatgattgtttaacccatgtaagccagtgtagagaattggtgtgtcccaaggtgggggcagagaagggagacaagggtacgtaggacaagacaggtaaagccttataaatgagatcatccccgccgggtgttggtggcgcacacctttaatcccagcactcaggaggcagaggcaggtggatctctgtgagttcgaggccagcctggtctccagagtgagtgccaggataggctccaaagctaaacagagaaaccctgtctcaaaaaccaaaagagagagagagagagagagagagagagagagagagagagagagagagatcatccccggattctgtttttctagtctgatgagaaaccattagtgggttgagtgacaagaaaggatactcaatatgaacttattgtcttgtctcttatgcagagacagggtgtcatgaagaaacttttagctgatgggtgacacacactttaatcacagcactcaggaggcaaagacaggagggtctctaagagttttagactaccctggtgtatataatgagttctacctaccaggcctgcatcgagacgctgtctttagaaaagaaagtcttgaagctgagtacatttttctggtcagtgaagatctgaaggggaaatgaggtcccctgtgagcaaatggagtttttgcctgtatgtaccttccctaaagatagtttagtacatgagccaataagtctcacagacccatagttactgatgccacagttactggttttcctacatttaatgacattgacatgttcaaccatcatttaaaaatcttcttagcttccagtgctaattgtaggatacaatggttactgatgagtagtgaatgcataaggagagaaagaataaggaaaggtttgacttggacttgagatgttggggtaaatggaggtagtaatatccaaactagattcacaaattataatatttttcctaagaactcttttgatccatatacttgaagtgtatgtttataaaaatcaatgattattaagagtcagagtaaatagctaatttgttgtttaagggaaaacattctctgctcatttttaggatacattacatatcttgagtctaatttacttatccaaaatataaaagaaagagaatttcctaatatggtcagttgtattgcaaattgtgttacaaccaaaagtaagctttctttaaaaaaaaaaaaagctttatggaattatatacacatatgtagtggcttctggccttgccagtgaactagtggtagtggtcacaccctttgggcgtagtttcaggtgcagacctgacccattactaggtagaggaggggctggctctcactctcttgggctgcattagaagggcagagacttcatctactggagcaggaagaccacagcagttatttactcttatctgtgtaagtgtttccctaagaaataccgatcatttatcttgggtctggtggactcatttaaaccccacctgcaagtatatactgagagagaacttaatcacatgcatgtaaagggaagtattcaaattatacaaagtaattatattaaaaaaaactgatgtctatttggacaagtagtcaaagatcaggaactgtcatttttatacatcaaataaaagcaactaatcacctatcatggaaggaaatgcagctaaggtggcaggttaaagaataaaattatgctacaatgttgataggactgcagaattgtgcatttatacataatagttatcattcaaactagtatagaactggtttgaactctagagctgaaaaaaaagatgtattgccctaaagagactaacaaaaaccactttactgaacatacccttcatccagtaattaattttcttgttgttttgctttattttgagacagagtctccctttgtaactcaagcttgccccaaaatcaagaaagtaagaccctcctacttcagccttacatgttctgtgattatgggatgtactaccatgcctggccagagatttctgtttccacagaaaaaaaaattactgaaaaaatattgttagaacaatgttagtaataatgatgaaaggctaaaagtgattttggtacctgacatttagagagatgattaaaccatatcagtagttcttaagacagaatattatttgaagataaaatgctacagtgaaatctatttcaaataagtagagaaatgcagtacaaaaattgcagtttgttcaccgtttattgtgcatttgattgcatatgaacacagtaagactataagaaaacagcttactcttttgtttttgtttttgttttctttgagacagagtgtcgctctgtagcccagcctggccttaaattccctttgtagcctagcctggcttccaatttacgacagtattcctgcctcgccctcctgagtgttagggttgcaggcatgagcctccatgaccaagtgaaaacaaatcatttaaaaaaaaaaaatcacattataaggtgtagagaataatggacaaggacaagaaatagggcgtgcctgatgctaataaccaggacctgggaatctagatggctctgcttccaatataggtggagacaatgtgatctgagaaatgtccttcaaggcttactggaagtaacattgattgcaaaataaaaaagtgagccgtgtcagcaaatgagatttatttttggattaaaaattactttaaagaatcttttagatctatgatcacagcccatatccagttacagcattaaaaaaaaaaaccctctgtgaaaattttaattcttagcagaccctgtactttgatatcgtgtacaaatgaattccaaaaaagcaggggattttaggaaagcctataggagctatcatagtggaatctggactgtgttgagaaatagaacttttgagcttatcctaccaggtcttattggaatggaacagtaaattccctagaatccactaggcccttaagatgggtggggtggcctttatgtaagtgcaaggcacatatgcacattgaccaggatagaagcaagaaaaggcaaagggatttcacgattgttttggacttaaaattttagtatgacagtgttgtatagtttacctttatacaagaaaggattatcctgaaatggggccagaatggatagtggcctccttgaaatctcatttgaaatcttctccaccttgctgctcctttaatcattaacaagtaagcagatatgaactccatagtgaccgttgccaaggaaagtcacctttagcacatgcctaccagtccttttcaaaatatgtaataatttggtttcaagggtcacatcttggttgatggttgctttagagccctaggggctgtggtagaatcctttgtgtctgaaaggtgtcatacctcaatttagtttcagtgtatggatatatattgtactgatatgccttgatatcactgatgtctagatagatgtttgttttatggagaaataggaaggaagtagagttgatattgcaatggctcactggacatgtgtaagatgacttggtcccttcatcttctcagctgagaacagagtctaatgtgaggtgaatgctacccacatgagtaatcgcttagaggggttaaagaaacatgggaagagcttgaaaaggtggctcagtggttaagagtgcatactgctcttccagaagatccaagttcgactcccaacaccgttgttgggttgcttacaatcacctgtaactccagctccagggtatctggcctttgtgggcaccctcactcatgtgtacatatacccacacaggcatacacagagagagatacccaaaaagaaaataaatcttttaaaaaacaaatatgtatagtgtgaagcacctccaagtacttttcatatgctgtgctttttgtaaggtgcctagggcaaagggatggcatttagagggaagggctggggtaaggcagtcattgcaaaaacaaatatgtagcccttgccctcaagaaattcgcaagagataggagagctggggaaaatctgtataatcagagaaaggtagtacaattaaaggcaaggtggcatgggcggaatgtggctgcgtgtgcggggtggtgtgaaagccagatttctctatttagatgtgaagactggctgatacacagatcacctccatgtataagttactgagtcacacatttaaaagtaacagagtgctagaattatgccctttgcttttgaaaattgccccccccctttctctgtgtttcaggaaatacgatataatgtgcaaactgtggccctttaatgatgtgggcaggctggggtgtaggaggcctggagataacttgcagccctttcctgctgtctgtcttccatggatttcagtgcctctgccaccaacacccttcctgagccccagtgcatgagtcccaaggcagtaagggctctaggaatcctttacaggatactggagtaagcagtgagctgggggagtacgcattttctttccacttgacttatgggacttaactaccatgccaaatgtattttctattactttgtaagtgtgtcttaacctttctctgttggattatgaatttgtcgagtaaggaaggggctcatttaattttcaatgagtaagatgttggcaaattctcttcaatccaaagtcttgttactaaactatgtggatccctttgtttgtttaatagggttcacaatgatatgaaaccctttcagatgacgtctttgctttctatgaacacattattcaatgcattctatgagctagtctacactttattatagtaggccctgggttagatgagtctgcccaactgtagggtaatgcagatatatttagtgtgtttacagcagggagactaagtcatgatgttttggtaggttaaataggtaggttaaattctttttcaatgtagtctagtctcagtttgtagtgggtttaatatgttttctaggttagggaacatctctgctcacgtagttctagacgtgtttgggatgcagaggagatttgccctcttactatttccaattgatgctctgttggattattggaggattagccatggcatattttaaagttctcacccacctctctctagaaacaggactgtggctacctacagtttgtgaagagaagatcagaggaagagctagctactgcactcaaatcaatctggcagctaaatcagaagctagtgaaccatgaaaacaaaaacaaaccaaaaccaaaaacctaccatgtctaacactataggaagagcagggtttgttctgggcaaagctctctggcagaacttagagttaagtagcagctggcatgagagtgttggcaagaatagtggagcagaatggtctgtctgccccttaggtgaagctgaggaattcttggttggatagattggaattttgatgactggcatggtgggtgggcatgtcttgtaaagctctctgtctcgggagtcgggtggtgttaatacagaatagtaagccttggacggttttggtgctttgcacttgcaaagaaacttggtcccctttttccccatcataaaagagaagttgatttaattcaggcaaggaccacaatgtaattgtaaatgctcatgtagttgtgtaattgaattggtggtaacttatttttagaaactccaagaagcagaccacagagttgcctgtaggaaatgagaagcagactgctgaaggggatcttgctgcatggtgtctaggtgcttgcatgtcacatgctgctgctgctgctgctgctgcggggtattccatgtgctggcttgtcactgcacaggtaccccaggcatgcatatggtgttcatgtgaagtattcctctagcgtctggcttgtcacctcagttacaagcctgtgagctcacctgctattacagtttaaactttgcaaacttgcatattttgtttttctctattttttttcttttttttttttgcccttgtctgggtctttcccagtgcccacccttgattaaaacatctaaagttttgtcagttttgtttatcttttcaaattgactctgttgtttcattagtcctttgtattggattttttttttttgtctctatttctgctctgatcctcattatttctttcctttgctggtgtagtttcctggaatgagttgctaggttgctgatttgaagtctatatgcatgcatgtatatggctatgcttatttattatagtgcttgatttatggtagtcctgaggattgaacttaaggccctggcacttgcccctggcaagcactgccaccaaagtttattcccaaataaatctttctattcctttgaggtaggtacctactgccttgaatgtccctctttgtaccactttttctgtgtctcttaattttgggtattttgtgtttgcacactcattttgtgtacactagttcatctaactgcttgctgtgtgaatagtgcaaagagtgatagctaaaaaagcttaagcttaatgcttcttgaagaacagtttcaggtgtcttccttgtgtcctgttaaatccatatacaaatgcattaggactgttgggtagtgggggcagggcaattgaataaaagttgcctcaattaccttaaagcatctgtggatgcctgcactgggtttgcacaagaattgccccccacacacacatataccatgtatggaggagaggggctcaagtagccctatttctcactgaggactaattgctagtgagagattcaggaaaagagggagccattgttttcagttcagtacctactagtgatctcgccagcttaaatgcatagttccaacccagcgccccgccaccccaccacagtcctagtttaattaactgcaatcatatatatatatatatatatatatatatatatatatgtgtgtgtgtgtatatatatatatatacatatatatgttgttatatatatattattgtcaaagaataaatttaattaagaacaaagttttctttcactttcctctcttaactctaatgcccacattgtcaatggtaatttttgactaattgggctggatagttttatgtcaacttgacacaaattagttaggaggcttcgaggtacatagtgttgataaaaagcttgaaatgtggcttcagattctggctctacaactcccatatgatcccagagaagtcagttaactgcttaagccaattccttaaggcttgacacaagctgcagtcatctgagaggaggggacctcaactgagaaaatgcctccataagatgtggctgcagacaagcctgtagggcattttcttaattagtgattgatgtgggagggtccagcccattgtggatgggatcaccacaatggctggtggtcctgggttctataagaaagcaggctgagcaagcatgaagagcaagtcagtaagcagcatccttccatggcctcctatcagctcctgcctccaggttcctgccttgcttgagttcttgtcctcaatgcctttgatgatgaatggtggcattgaagtgtaagccaaataaacccttttctccctatcttactttttatcatggtgtttcatcacagcaatagaaaccccaaccaggacactaggattagttaggaggcttcgaggtacatagtgtctgtatgaaatgtggcttcagattctggctctacaactcccatatgaccccagagaagtcagttaactgcttaagccaattccttaaggctttcagctgcaaaatagaacggttatgttcttacttcatttaatttctgtgcagtaaatgttcgggggcaagtttaaatatttgctaatgtttatggactgcttgattcatcaaagcacaaagtgcacaaagagaagcagatgaggccacttctgttaaggagctcacagtgtgatgggggaagatctatgtatgagatacaccagcttcagctggtgccacagaagacaaggtcatgcatggaaaggccacttgtaggaaaatgtaaaagaaaccttagcaaaaggaaggcctacatgggagggaaggacaagaacagaggatcatgggtaggtgtagggtgactgcttagttaacactggtagccctcaaagatggactgcatatgtaggtgatcctcccactttttcctatactgttagtcttcgttgatgtggtagccaatacttgttcctgtgccatcaaatggtcctgagactcacggagataaacttgtctccagaagacaaacatggctgataaagcaggaagaagagacctggctataagacctgtctaatgggaaggccactctgtagagcctttggggaggttgtaggagtgggcagcccatctgcttgattgttgtgggactctcctgccgaccagacagatggtgatgaaggctgatgcctttttgctacaaactgaaaaactggaaaaggcaatagaagtgaccgtatttgcttctgcagcatgaatagtagggccattctcccatccatgtagccccttctgggtcacttagactataacagaagaacttgattcattagatcttacattgaccactaaggaaaaaaaaattaccttatgtattgaaatttgagaagccttggaagacagaaggcatgagttctacccacttggccccagctactaaagattatgctacttcccaaacgtgccatagactggtgaccaatcctctaacacatgggcctttggggacactacggatccacgatatagcagaagactgtcataaatagcaatacagagaactattggtgcttcagttccaatatcattgtcttacattgttatggtacctttgtctcagttcatgagctgataccatttttttaatgtaactctacagttgagtcagacttactgttttccccaatgccctttcttctgaggtcctatcacgtgtccttttgtgttccttttggttatgtcttggattatccctggttttcctgtccttgacaattttgagaaaactgtcaagtgttttgtagaaggtccctcagatttgtctgatgtttttcttattgttaggctagaatgatgtgtcctgggaaggtaaaatgcctttctcatcatatcaaatcaacaatagtaagtcacaagcagttatccctactgatgttgctctagactacctagctgtttgccaggtgtcctaactgtaagttttctttttacttccttatgttctcattctggaatggctagcaggaagtcactatgttcagcccataggaagaaactgggaagtgatgcaccttttcattagggtagaggtatctacaaaattatttaatgtaacttccacttaggcatggaagatttatctacattctccatttcatttagtcatatgtatccttcatacctgtgtatgttttgtttttcactttgaattgtaattggatatcactttattttgtagctcagattatcccagccttgggcccccctttacttcctctttcagttgctcctgtgtcccctagtatctccctcagtgttgcggggctcatctgtttgctcttgtctctggatgctcttgtctcattcttgttgtattttgtatttctgaccctttggaatttgtaagaatgaaggaggatctcaagtcataagttgtatagccagagtgggtttgaaaaacaccagtggaaatgaagtaggtcttagagtgttctagaatctgtgatgcaggaaagaggagagtgtctgagacgctgattgcacaaatatgctgagacttcatgagggggagagagagagacagacctaaagcagctcatgtgactttaggagacaccttgtgattaactgggattttaaaaagtaatgcacagaaaatggagaaaggctctatagttagagggagacttctaaatatattgccatcagaagttaatgacttctggtttgttaaaaagccttccatggctcgcacatgtgaagctctatggctcatccaacaccccagctatattgaaatggaagctgcttttagttctctgaagccagctctgatctcacttcactctgtgaggaggtttcagtttaacacccactgtgtggactcattcaagccctaagagtgcttcagtgaacaggcctgctgaaacccgtgtgctcatggagtagacatctaattcaggaagatgggttctcaaataggtagctttgaaatatgtcaggtagtaatacaagctgtagagaaaaggtaggggacatggagagttctggaatggggcagtgggattgttgtttatataaggtagtggatgaaatccccattgatgagggggcttgaggcagtagtgtgctcagtgccagtcatcaatagcagtgaggctggagtggactccacatggaagagatgtagagaaaatgagggcaaacacacatgcctgggcagggcaacactgctcacagaaaggatgtgagagtggctgtccccagagctcagagccattttggctatggtccctaggaagctgttgggacttgggctcttgtttcaggggcagaagagacattaagacttctgaggagagaaataaggtgattgatttcacacttgaaaggaccgcactggccaccatggtgtgggggccaaaagacagaatcagggtgaccacttcggagatcatttcatctattagtatgtgctaatctatgttaaatttaccctgttttatgtttcacatattaataattgtatgcataccacctgcctcctgtatgttgtactattgtccttcgatgattatgtagtgtttaagtagctatatattagtttgtgtttcttattgctataaacaacatgaattttctgtcttaaaaggacaggggttccttatcttctagctctagaagtcagaagtcctaaaattgaggtactggcaggacagtgctcctcctgaacccccactccctgggagcatgtttcccttgctcttctagctttttggtttcctggctcccagctacttcctctgtctgttcaagtctccctcttctgttgccatgattggggccctttcctgcatcttactctccactctatcttctctgcagacccttgtgattgctgtggccctactccgaagtccagagctttaatttaatcacatctatggaacactgcttaccttagaaggtgccattgacaggaacactccggggattcagagttgcttatcttagagagaccagtattcagcctggctccagacctgtttggtacttggtggttctgctcctgtgggatgcagctagtctggggctggcatgactttgttatccttccaatattgctatactttgaatttctttttctgaatgtatctgttaagataagtgtgcaggtgtaggtttcctgggacaaaggccatgagcatcttatctatttgttctctaaatatatggctacattatcaattgtgactatgtcctttcttactggcctttttttccccacactcaaaggtgtgtttccataggatcttgcaagacaatatttcattgtgtggattcaacttcccttttggtttgcttgaatgtttttggtgtgtgtgtgtgtgtgtgtgtgtgtgtgtgtgtgttgtcagttgtattttttgaggacagttttgctttgcttgttagttgtatctggagccagaatagcagagaaaggcatagagcattgcttaagtaggtaaggctggcattaataagtgatctatacagaattaaatgcattgcttttgcatctcatccaagaaatgatatttgaaatggaaaaggcactattaaaagggatttagtagatagggacagattgttgcagtaatttgagtgagtgcctatctctgggacacacatgatcagattgcagggtgctaaaagtgtcagttagtagatagtatcagtgactgccattgaacacagaacagatcttggagagcaggggagcttccagaagacctgggacatacggatgttctgcatctgtactgtaaaaactccaacttgggtcagagaaatggctcagtgggtagaagtgcttgctgccaagcatggcaacccatgtctgtccccaggactgacctacatggtaaaaggggagaatcagctcccataaactgtgttataatttccactctcatactgtggcatgcacacatacacatacacacacacacagagagagagggggggggagagagagagaagttgctaaaactagccatatatttttccttgcaaaaaaaaaaaaaaatgagttaccattatttgtaagcccatagaagagattgccttatccctagataccagcagcaatttgctaatttgtgtgacaaattcatcacatcctattttgacaggtgtttctcaattaaaaggtaatgtcataggagcagaaacatttggtaaaattttcccacaggtcttcttaagcacaaggagagagatgggtgttgatggataacaagataattagatgaacccacagcaaaggacatgactgagtgccagttggcctggaagacattccagaagcaggtgatcaggcttttcctaacttaagaaaatccttaggactcggataaaaatctaatacagatacacacacacacacacacacacacacacacacacacacacacacacaccccacaatgctactgatggcagagtttaatgagctagctacacttgtagaataaatagtgtataatataaaatatgaaattgttatccatcaactatgaaaatagccccaaaccaaataaattcacaggaaataatgataattttttttgaaaaattatgttgtgtttaatttgggacttcagttgatttccctcttttcttgattttttaaaaattcatcagttaaaaataaatgcaatagcatgtatgtagcaaaaataaaaagaatgttttaaggttactttctgacatggtggggaaaggctgagcctgccagcacctggttgatgtgaaagcatgatgtaagaccactgggctaggagggaaagagtagagcctcactattggaactgtcatgaactcattgtcttgggtaagccgttggtcttgagtctaagggcctttttttttttaatctgaaagttggaggtggcaaggggtggggtgcagttaatggctcagctccattctcacatgtctcgattctcatgcttgtgtctgtgtggctgcccaagtgcattcttgggcctctcagccacttgggaaaaattctagactaaatggatccttgtaaaggattccttcaggatcctatgaataaactatccttattttcaccttaggtttgacccttccatatgaggttcacataaattctaagctgagggattaaaaagttagctctttttgatctgacgaatacccaatgttttcttgttcagaatacaggggtactccttggggctttctgaatgagtctgtcctccccagatggggctggccttcgggttctcactcatatacctccactgtgctatctcactccccccaatccaattcttgatccttctctcattctctcattatttcagcaccactaccttgatttagttataactactatgaggtcttacttttgaatttctcttgttttctttccttcatttcaaacagacattggagctaattgaggaaagtgtttagcatagttttgagggtggtgttagggtggaaagggaggccctaagacaagggcagctcacacccatgagaagcacaggattctcaaaagagttgcctggaagtgtcctaacagccggcatacgcagattgtcgtggtttctgaaatgactcgttgaaagcatttctgaagaatgtttctttctccctaagtgagagcatagtgtgcactggacaaaagtacaggctgataagataagcataggtcaccgggttcaaggaaccatgatgtgctaggtcaccagggtgtccagcatatgctttgactgtaagcagggttcacagtctttcttgcaaatctttcaacttcgtgttttcttctcccaatttgtattttcattctaccctctgtacaggatttagctacagtccacaggcctcagattactcttgcctagttacatgttcttctatgattgctcactaaacataaccaagtatctgtacttttacacacaaaacacaatgcttatacatctgcacacaatctagcctttgcttttggtgggaggggttttttgtttctatttatttgtttgtatatttatttatttatttttgtcttatttattgggttaggatcttatagtggttaggactggagtgatggctcagtggtcaggagacttgcttctattacagaagccccgggttagatcgccagctaccacatgatggctcaaaaccacccacaattccagttccagaggatctgatgccctcttctcacctcctggtacgccaggtacaaacacagcacatacctatacattcaggtaaagcagtcatacatataaaataaataaatctaagatgacaagcaggtctcataggagggtgtttcagattgggaggtcattgatgtagttcttcatttattggggctacctttgttttggttgacagaataaccatggaaggtcgcttcaacgcttcatatgcctccctcagaaccttaaaatacttacgacttgtttatgtactcatgtatttcagtatccttctggtggcttctttcaatgcggaaacatttgtggcaggatttttagccctttgtcatctacatctctcgtttgacttctaccctgaattcatcccagtaccagcactattgtccttccaaggcttgttctagtctaggtttcctgcgcctatatacatgcatactctaggctttgccctaagttcttgtgagtcatggagctaacttcatcttcttggtgtgagttccttatgtattatcccagagagtgacgagctgtcctgtgtgctttctccaaggtatatcttggagttctatgttggtttctggttagtaccttaggacagcaataaaccacccataatagctgtggactctatgcttatcttagagaagcatttctctcttatcaccacctgcagacaagcctttgctgttatgtccttgctggtcatgcctagagctgtttcccaacagagtcaagtgacaaaaagcaggcagccacttcggtgtgggcaaggcacagtcatacacattcacattacatatctgaattttctccctaaagaagcaaaagggattggatgggtcatttatggtcagatttaggtggcctgttgctcctgaggctgaagaattagtaaaagctttccaaaccttcaagacataactagttttgggaagagtttttgatctgattggtattagacacttttaggggttggttaactattaaatagttcccatgcagtgagagaaaatgaaccgaaagttaattgactgtgggaaatgacccactgcctctgtagtcacagatgtgcaccgcagaagaacttaggcaattttttttgatatatgcttatcaggaaggtctctggaagcaagctgtaggctgtagttcaggaagaaaaggcttggaactagggttccaggtcagtagctctgatgacatcaccagggctccttcagcaacagagctatttgtgtgtcataaactgtgatatgactcaaggcaaatatttatttagtgagaagtgtaggtgtgcatggtaaggccctctctttccttaaggagtgcttcctcatgaggctcattagctgggagcagctcagactgtaaatgtcacatgatctcagcttaagccatcctgtggctagttatccctgagttgtaagatttcaggctcagataggatttgatgggccagaggggttttgcttataaagtgggaggggttagtagaagtgagagatgagagcatttctgagtaaatgtagcttcaaagtggttatttgttgacatatttttttaaatttggtttgttgagtgagggtttctctgtgtaaccctagctgtcctggaactccctatgtagaccaagctagccctggactcagagatcctcctgcctccgatttctgagtgctgggattaaagctgtgcgccactgagcctggctactctttagtatttctcaatgtcattttcctttctcatttaaccaaacttgaaaataacaaatttacaaagaagttaatatgttttgtcactccacagcacagatcaaattattgttcatgttttaaagatttctttacagcctttttatatgcgggtatgtgtacaaataaataaaagcataaatcaaaagttttgaatgatatatgcattctcataatttgtttatttttttaattatgtttcagtgggggcctacagggccatttcagaaatcaatttcctccttccacatgtgggctttgggtattgtgctcaggccatcaggcttggctgcaagcacctttacccactgagccatctcaccagccactacttacttggttttgttgttgttgtttgttttcttttaaggtctgactatatagttcaagcactcctggaagtctttatgtagcccaggctggccttgaactcacgatcctcctgcttcggcctgcttcagtgctatgagcatggcaccatcatagttggcttgtaattgctcctttgttgttactgttcatttttgcagcattggggattaaacttggggggcttgtacatggtaggcaagcactttacccctgagctgcatccccagccacagaaaatgacctttgtgacctttgttttccttaacagttcgtattttctgtcgtttgagcagcactttagaggctccatccaaactgattcccagctggctgcttcatctctttcaggttttccatctgggagacaaccttggctcatgaacacaccgttaaacacggtgaaatatacctttccagagagtgatccataggtggtatcgctgagcactgtggccgtctggggtcaaccctctgacaccacgggggagggtaatttagtgatactgtttactaaataactagataaggtcacttctagttctaaaattctgtgatttgaaacactgtttatatgggacaatgctttctgtgtccccagcaactgaggttttttttaatctccctactccactgagagatctggggttagctggacatagtcacaaaatatgcagatagtgtatataaaacgggcttgtgtgtataagcggcagtgataaaagtccctgctgtttgaaccttactgtgtctcacttaccctctatctttagagcctccatgacttcacttgccttctgcctcacagtggctctttgaagcacccctgattatcttctctctgcagatgaggaaccccaggcaagtggagacaagacacagtccatctggccccccgccttgtggcctttcttctcggtgcctcccaaccccatgctagcaagctttcctcttatttgacttacttttcaaagtccctccacaaaacaggtgaaaggtcagtctttataatatgcattgtaaaacagtaccatttccttcaaaatatctaagatatcaatcacttctgatccaatcaaatcccatggtgggtgctctgcttctcagtggtggtgagaaggccagtagccatggatggtcccagtggccagggaaacatgagggcaggaaaatctctctataaaataacactatgttgcacagttgcaaggcttaaatttactgaaagtgctctaggaagaggagatgacaggcctgtcattttaacatatttcattacacctaaatttcactagagacctaactggaatgctcatttgcttactggctcatcacctgggagatccttcagggccttcttgcacagcggtttctctgctagttccagagatcccataatcggaaacagtcagttctggccttcaaggcgctttgtgttgtttgaatagctcaaatgccaaaaggccttttaaaattacctcaatttcaaaagagttcccttagaagtagtatggatacttgaggagaaatccccttcatgtaccgacttggcaagtgatgttcttgatagctcagagacttgctcaatgtgtacccatttgctaatgtgggaaccagggccttgtgccattgcttgaccaaagtgtcagtttattgaaggttgattctgcttcatcctctatagccctgtggacttgaagagttgctttatttgaactaagagaaaatggggaataaatgactagactttaagagtcccccacctccagcctgtgattgatagttcctgggtttcctgctgagtataggcagactctgggcttctcagccaagcccctgatgacagcaccgggaatctgccatgttaaggtggagtctgaggagaagagtcatagacttggaagttgaagactctgccggagcctcttcctgaaggataggattgaactttatgataggctcttgtggcagctgtccattgagctacatttgtctccctggggtgggaggagggtgtagaaatgagaaccagtgacatgggcaagaagtcagtaggtttagcttctttagatattgacagatctgcctggtatggtcaaagatggaccacattacaagatgaacctagacactgtgctgatctcagtgtttaggttagtgcaacggaccccggctttggaaagtactttccctgtgagatatgcaaccatatcttacagggtgatgtcacttgaataggtagatttcatggcatgccagccaaggttgtctattccactatcccatttaaaattatttagaggaaaaaatttctatttctggatgagaacaagttacatgcctgttctcactcctcacaggttagtctgccagatccttaaaatatctgtatcacataagagtcaatgtctccactttggttatgtttgtggctgtccccttcttcccaagatagcctgaagctcaaagaaggtgctgtgtctggatgcttctcaggaactgccacttctaggttgaacttatggcctggggaagagtaggatcaagcataggtttgtctcatgagagttgtctttgagctgtgggtatctaaagaggattctttgtcttgtggaacctttgggctctactaggctcttcagggacactcttgttactgtatccagggacctcttgcttccagctcatggatgttgctactcgttcttttcaacctctttgtaaagttcctgtctctgtctctagtaacttcttgtatgggttccattgctgttctgatggcctttgttattcacaacctagtagagcccacatacacaggtcagagtatgaacggggaaagtatatatcgtttgtgccatataactacaggagggcagctgatcccggccaagtctggtgggggggggcagagccatgagcagctgagtctactgtagctgtgggtttttaggttgtccagcagcatccaatcaggctgcttttggcccttcacgtatctcagaattgatgagcaagatcacagtgttgtgtctgtcaccatggtcctatggaggatggtgctaggcaagaagtggggggcaggggcaggaatccccacttttagtccttcactaagaccactgtgcagcccacttgtgtctatacccagcaggaagctacacgtgtgtacacacgtacctgcacccacatgtaggcatgtgcttgcccactcacatgcacacactccattagagataagcagagtagcacaaccacgcccattttacagatgccttcacctaggagatggtaggcttgagagcagagtgttattcacaagtgtggcccagacctcagcacttctttccctctcttggtcttatctctcctgtctccccactcctccgccccccccaaccttcttacccagctgtcctctgaactcgtaacaagactgtgacctggttccctatgccatattgtactgaggggatagtagtccagattcccagccagaacctgtcttcatgaagtagagtaggagactcagttcagcctctggagcagcatatgtacttgtggtaaacggcaatggttgtcaggtctctcctccagaacccttccttcttgatgccaacccacatacttggcgattcaagggccccgggtgccctctaccgagaagcagtctgattctcaaggaaaatggttctacatggctcttgactactcccccagtgcctcctcacaagatttccccatccttggccatgaattttcctttaatgagttttctgcatcataaagccaaggggacagtccacattcctcaaggtcacagcctggatggactctcccaggggggaggcaggcagcttatctcactgcagtagctattgtgtcatgccctgtctggatactaccccatccaatacagctgtggaggcatattgcttagttgctgtctatggaatgtgaaatgacggaccgccaattcctcaggctagttactgccgacgtgtcattttgaactgcacactgtacctcagcggcatcatgttgcatgctatctttttggtgaacgtctttatttatacaaataatgccttgcatttgaaatgtgcttcgtagttagcacagcacttccattttattatctaacagggctctgtttaaaaaaaaatgcaagtaaggaactaatttgagaagagagtgagacaaaaatatggtccttactgttgcttttgtataaattataatgtaacataacattttttcttaaacagcaagtacttcagttacaaagattaaaagtatgtggtaaagctgtgttgtttacacatctttgagacttcttaccaaaatctaaagagtagaaaagtggatggaaaattctgccccagaataaaataagaagtcataatgttttaagtaggaatccccctattgtttgaaagaaaatacattttaaatgccacatggcaaagaaatggattgtttttttttttaaaagacaaggttctctgtggctttggaggctgtcctggaactagctcttgtagaccaggctggtctcaaactcacagagatccacctgcctctgcctcccaagtgctgggattaaaggcatgcaccaccaacgcctggctaagaatatttaagctggagtttgctttgcatatgggccgttcatttctttttatccaggtggtagtcatagaacataaaatataatacatgaagattattagcacatgattgccacactggtttatcactaggccattctgtgtagtgcctagtatagaatttccaaaaattatttctgttacagagatcaaatgtggggtgcaggaggcaagatggctcagtgacaaaggtggttgccaccaagcctgctccagaatataacccaggatatcccggctaccaccccatgagccctggacagctgctcagctgcctttttgctattgtggccatttttactactggggaccaactgatagatcttcagtgtctggcttctttcactcagcgtgtcttcgagcttcatgctccttgtaatatgtatcagtactttatttcctgctctggctgaatagccagtatttttagtatcaaaacatttaggggatgctgaaaactctggcacccacccacacacagacccactatatcggtcccaccgtgggcaataacctcctctcacagcaagagtgaggtttgagttgatcgtaaagtaccagtgctaagggaatgtgtgaggttaaggctgtaatttgttgcatatttaaaagacaggaagcaggtgggcagctccatgcaaggattacaggtcattctttgtataatacatacctcccaggaaataacaacaacaacagaatcttccataaaggatgttgagagaattaacaacagtattctagagtcgcttacatcctgggagcctgtgctggcacgcatcttccagagagtgctcggaacacatgtggacttattggtgccctgtgatagtcctggtgctgaggctgggccccgctggctaaagagatttctccagctcctctggatggctttaagttgcctcatgtaaaaatgggaataatgatagctacttgtgttctctcaacgagacccgcatcctaattcctgggatgtgcaaatatctggaatctgttggcttgtttgaaaggagggtgtccccaaggtttttgagagacagagtggttctggattatccagacagtccctcagttcatcccagagagggactccaaagacaggcagaggaggtggtgatgtgaagacagaggctaaggctgacctaagcaagggaagcctggggctggcacagtgagaagctggaagggaccaggctgaggctctcccttagaacctcggggagagagcttattagcatctgcatttcagccagtacttgtgaacaagtctctttacctttagcagcgtcacttctacagaaggctttctcagccatggcactggtagcatttggtgattcttggctggggagttgtcccctgcatgtgagatgtttagccccattcttgccccctagatgccatagtgccgttcccctattgtgacaaccaagactatcttcatgaattgcctgtgtcacctaggggacagaggtcactccctttactcacctagaggtttgaccctaactacagatttaagtagctgtgcagctgtgggaagcctagataatctctttgaacctcaatcttgttctgataaggctattcaaatggtgtactatatgctaaggccccagaactgttccctgtaaaatataatacatgaagattattaacacatgattgccacactggcttatcacacaccattctgtgtagtgcctattataaacctagcaggcatttgaaaccttttccaaaagtcgtttctgttacagggatcaaatgtggggtgcaggaggcgatatggctcagtgacacgggcttgcagcgaagcctgatgacccgagttcaatcctcaggactcacatgctgaaaggagagaactgactccttacttgtcctctgaccaaccagcacataccctggcacacgcttctccttccctaaccaaataagtaaatatgataaaaactaatacaaatatcagcacatgttttggcatcatttattccctcttcattggtttctcctcctgtcttacagcttcccaccactgtacctatgagctgaggaaactgggcttgatgcctttggatggactacctgtcagtcaggcgaactccttgagctctttagctaataccctgaataaattgtaacaagcaaatcctttccgtgagtcaatgacatgtctgctactccataattacagctttctccacagtgatagagctgttgaattcactaaggaattgtgtccttggccccattcagatctgtgaaatatttaatagtgtttagcagctttcagtaaaggttaaagagtgttgtgaatagatactgtcatctatttttgtaaggaagaggaatgcattccaactggggactaggccattgtgcctctgtgcctggggacatggtcatgaataggacagaggtttctaagagcctccattctagccagaagtaatgttaggatgttcaataactctgtaaaagttatagcttattagtcagtggagatgggagtggcaaaggtaactctgtgctcctggtttgggcagggtggaaaaaccactgaagttcttcagatgggtaaacaaaaatagcttggttctgctgagtccagtgtttagtgcactgtgcatctctgcccaaatgcgctgatggtcagaatgactgtgtttttcaaaggtgtcttctctcctttctgagtatcctgcctgaagtgcctttcaaacttaacccacctggctccagtttatcccagccaccatgggagttctttatagcaatggtttggagatcattactggctcacagactcagagaaagtatatgcctagcaggtaagaggcctggttcagatctctgtaattctggatctccacttaaaaagtggatgactttggggaagtcgttaagcctctctgagcctcagtagccatataactgttattgtaaggattaaagtattagaggcaagtagccttgtgtcaagggtatggtgtactcgaaaatgctggtaataagaatttcatgattaacatagaatactatttctatgatacattataattagtcactgcaattataattcatttgtgaaacatacctgtaattatcagtttcaataggcagtcacttttcaaataaaccctccctaacaatggggctccacacagacagcctagggctggcctcctgtgaccttgggactgagttattctttgcatatcctgtatatactacacaaaggcaggctgaaatgagagagcagaggctgtggataatttaggtcataaaaatctggcttgtagaatattcacagtcagtgggttattctgtggatcagccttcccagctgctgtctggctctcctttttgtggataggtacttacaaagacacttgttgaatgggtctggactagagtgagctacctggttatattacgtgagtgaattaggacgttcctcaatgagtcgaggcttcgttgggaaatggccagaatcaaggctgattctcaaagccaaagtgtcttactgccctacaggagagggccagggactgggaaattgtggcttcacagtgatgtgaacattccaaatgttctctctgaaatgtttgctcctggggctgggagcatagctcagtggtggagtgcttgattggcatgcacaaggcccccagtaagatcatcttgctctgaaaaaatttttatgtaaatttttttcagggccagcacccaaagctatattctcacttcattgtatgatatttaaaaattcttcaagttatagtatctgttctagtttgttttctattgctgtgataaacatcatgacaaaagaaacctagggaggaaaacgtttatttggcttgcatctccaggtcacaatcaatttttaggtaagttgaggcatgaacttgaggcagaaatccagaacagacaccaggaaggaatactgttcattggcttgttccctgacttctgctcatttagttttcttgctcagggatggtacagcccacactagctatgtcaattagcaatcaagtaagtgccacacaggcatgccaacaggtatatgatcaaggcaaacccccaattgagactccttaaaataactctgagttgtgtcaagctgacagctaaagtgaactaggagaatatcttctatattttacatagcattagtgcattgaaagtgtatttcagtgtgtggaacattctgtgcttatagactcattcatgatgttatgatgtcgtattggttacatgtcaattgtgaagattcaagttgtttggggatgacttcaccgccatgggtgcccagtaaactgttgttttctaagttgcctgtaactttataatgcaaaatattattggcaacagacttgaactgtataatgttagagctcttagagtccatcatactctatgataagccaccaagtcctgggaggtttgtttagtcacttagggcaaggccaggacactgctttttagctaaacgtggataccaatgtgcactctaggccattgtatagtttgattttctcagaattttttctttcttttctttctcttctttctcagtgaaagccatctgatactgcagaacagtcatgcctttagcagctgtaaggtgtgtcttctgtcctttcttgcctgatgattgccagtttgtgttttaaccagtcccctgggcttctcgtaccttactggtgaatgggaaaatagttctctctttccccactcaaaggcccaaggcccagagtagatctgcctttgagccctttgcttccacttcccagtttcctggttaatgggtatgttcattataatggtgggattatcgcaggttctttttataaatcttccttttccttcatcttgttttgaggaaggataaagtactggggaggaagggactatgctgtggacagatgggacaggtcatatctggaatgcaggcagagttctgtcgtattttaagttctgtatgatagagtgtgacttgttcaaactagaaagatagaagagggtttaaaagcaggattgtcagccacaggacataaaaataagagtggcattgtggccaaaccaaataatgtaggcttttaatttccctttggctttgctttttagtgaaaataccagagggtggggatatcaaagactcaataaaattaactctagtacccgagcttactggctaagggcatgtgagccctgaagtactagaaaaatcctatttcctctcttaggaagtcttcaccaaggaaaatctactgtaagtctgcttgcttgggatggaaggaagacattttttttttcattgtggaaaatgtataaaatatgagtgattaaggtagcattttggaatgtatccttcaatcctttctgtttgtgtttatttccaagtttcctttaggataggagcatagaaggcatgctgttttaaaatcttcttatgaagcatttactatattatgaatatttttctgagtctaagtaggacccacagcatttttaatggttatttcttggtgattagcataatgaacttattggctagcaccagtgactggagaatctgcagattccattccgtctattcgtaagtcttcccaaggaaaacctgccctacatctactgatggaaatttataattttaatcattaagtatcagaaatatgcttttaatatccagggtcatttccttaggacagcttcctgaaaatgcaattactagatcagcggggttttaagacattagggtatttgtgcactgctcactttatccctgggaagatattgacatagatttagaccagtgatgggggttgttctgttcccaggttgcttgaaagttgcttgtaatcactttttatttttcttttttccggtcttccgagacaaggtttctctatataacaatccgggctgtcctggaactcactctgtagaccaggctggccttggactcagagatccacctgactttacctcctgagtactgggattaaaggcaccaccactactgcccagcatgttgagttttttaaataattgatttttaaaatatttgttatacattatttggtttgggcacatacacaatttgtggtctttgcatgaattcttttctaaattgctttatgtcatttgtctatactttagagagtgttttgcttttcaaatgaattcacagacatctgtgttggctgtaattattagtactctttccgttacatgttacagatactttcttcagcttgtttacatttttttctcgagagatttataatgctatgctgtcagatgtattctttttccctatgaatctggcctttatcacgataaggcagggtttttttttttccattctattgcttcataaatattaccttaatttttgtggtttattttttcatgctaaaaaatgaaattttagagggaaactctatttcttttaaaaaatttacttttgtccaaaaagaactggaaagtatcctttaagccagacagtgattctgtaaacctttagtcccagcaattgggagacagaggcaaaaagatgtgagttcaaggccagcctagtctacagaacaagttccaggacagccagggctacacaaagaaaccctgtctcggaaaacaaaacaaaacaaaacaaacaacaaaattatcattgtgtaaagtcagagacagggctctaacttgatctttttcaaaatagataagaagtcaaccatcatgatacaaaaatctttcttttgcattgatttgaaatgccttattaattgaacactgaattccagtcttctttgttttatttttgagacagggtttcatgtagtccaggctgactttgttggtgtctgagtctggtcttcaacttcagatcttcctaccttcacctcccaaaagcctgaatgagaggcctcccatcatgctcaacagtccagactgtttttaaagaactgaacagaataggtttcagttcctattgctgatagaacagtttgataagttctaatgtaggccaaacttacttactcattttttctcccaaaatattcataagaattcttgaagattagtcttcaagaactttacagtcattttgtcaaattataaagaaaacctctgatggtatattagttatagtttaatatatacatgatatttaaaaaaccttttgggggagagaaaccctcacatttatccttagctttaacattcattttatcacttgatgaacacatcatttcatcattttttcttttatatcctatcataaaaatgcacagctttatgtacatttctgtttagcttctggtggcttgtttagtgtcttttgttagtatctcttgttaataagcatgaattttagcccatatataacaacttggttatccctagaatgaagggaacttggtttttgcctggtgactttgtttagttttaaaatgatgctattacagtttgctaatatcatagtatcataatatcattttgccaaatatcatagtatttcttcatattaatttcatcttccagcttccatcatttatatttttattgccttaagtcatgcatgacttgtagctttcttctaggactttggcagtgacaatctttttttccccaaaaagatgttcttagtaacacattactcttgtgtgacctacttgatacactgccatgaatgccagttgtctagtgctcctacccactagaaggtgacccaccaacccagtaaatggatctattttagggagcgtctgacaattctctgactcgatgctgtgctggttttgtaagatctataaagaagaaatgtgaagtatagaatatccaagttagaaaagtagatcagcaatccatgaatttgtgtccagccctaattttctgtgaaaaattatcaagactttggatgtatagaataattgaatacccaaagtgtacacttttactttaaaagatgaattaatttttgttttattgtgccctactttaggatgccctttctaaagaattaccttttgtctaaagtactgatcccatttgggggtttagcagcatggatattttctttttttttccctttgttttttttttcttttttttttttgtttttgtttttgtttttcaagacagggtttctctgtattattttggagcctgtcctggaactcattctgtagatcaagctggcctcagactcacagagatcaacctgcctctgccttccgagtgctgggattaaaggtgtgtgccaccaacacccgacctagcatggatattttcaaaatttacttgtgagtaaccattgtgtaaggatatcagcaacagtttacaaaaatgtgtttgatgccaatgtgaaaggagaatactaatttataacatatttgtgtccttatttagacataaacctttcttatttgttgggctcccttttacaaaaaaatctgatttaattaaattatgttgtatgagtagtataggatttacctcctctaaagttgggaactatgggtgctagagagatggcttagctggtgagatggcttcctgctcttctacaggaaaaactcacgactgctgcaactccagatccaggaattcagcatcatctctggcttctgagggcacctgcacacatgcacacatgcatgcatgcacacacacacacacacacacacacacacacacacacacacacacacacagatgcaccaattttcaaaatttaaatgtggaagatattgaatgttataactaagctaattgttgtggtactgtatctacaggtatgtgtactatccttttagctaacattttaatcacctgagctacctagatatggggcatggagagagtcagagaggcagacagagagaactatgttagtggactgtgaacctggaatgaacgatattctctgcagagctagagaaagaggtggccaaagccctgaggatgacccaggatgacttcacaggatccaccccctcacacttctgtcctccaatgatcattgacccatgcatccttcacaaatctaaagagcaaagctgggtgatcctgcctgacccttgcaagacttaaggtcacatgaacaaatactcctgttctctgagctactgggtggcctctaaaagctggccgtgtcccctgagttgcctgtagacttcactttgccacctttgatcagtcatctggcactgaccccatggttttaagagtgtaggcttcctcctgctgtgcacaaagaaagctgtatataggagctaggtcacgttgccttactcctaagactaaattccagaactgtttttaagggcctttgaccatgtgatattttacataaatacttttaaagacaggtcagtctgtctccctccattgtatactattggttccaaaaattcatagctgatccatttgcatatcaaaaggcaaaggaaagaaaggactggaatgagaagcaatgtaaagagtttttcaattctctgtcttcttattttgtcagcttgacacatttgtgggtggaaatggtcattttagaatgggtatggtggcggctgtgcctcctgtgtattcggtttgggtttcacaaggtcacctgcaaactgaaagccaaccaaccaaaaggaaagctcagaaaaaggtaactttagtatctttcttctgatcagccctctgtgacagtcacacgtagctattagctgtagtgtttggcagaagcacagctctgggacttggactccctatctgctatcttaataacttgacatttgtagtatggaaggaaacttaagagaaagagcctggtaccactgcaaagatagtgagattcaaagacaagatgctgtaagacagagtcagtaaattcaatgctgctttatcctgactaaagagaatcaggaacttccctttggcaggaagatgttgggccatgtgagtgcctgcctctttccaagggaatccataatggaaggtggtcctttgattatattcattcctgcctttccttgaagatcctttgatctgacttccttatattactgtgtcagtaatgtaatctgtggccacatatgaacactaagtcctacagagtggctatgaaactgactttttacatagttttaaagtttaaaatatgtatgtgtatatgtatatatttagtttagtcccttgaaaacatttaactatgtttgaagtaaatgagtatatgagcctaccatttcatttgcaaattttatgaaatccaaatatagtcaagaaattccagttcccgataagacgaggtaaacatacttcgctctgtcccctcccactgaatgcagccatgaagcctggctggaatgcatagaacagctatgtgcagactgtgggaataagtactggctgtgagatgaaggaaagagcccacaatttgaagttccaccaggttggcaaaggagggaataaatctgacctgcccctcacttcattgtgcccagaagagaaagcttgtgctaagcctctgaagactcaactgactgaaaccacaacccacagaaaggggttggctgcttgaaacttagcaggacaatcacctgcagaaaccacagcagaccattctcagcaagccttaaacaagacccacagcctcgtaatgcagcattccaaatgtccggcacaccatgcagaatggctttataaccagccttaccttgcctggggtgaactgggggaatcctcagttcagatggagaaaggtactcaaaagaaaccaatacagagattggcacagatgttgggatgctctggtagatgtcaaagcagctattataaagatgtttgacaaaccaaggaagacactttgaagcagatagacgatggaagacctcaacacctgcctgggggatatatagaagagcagagtttaaaataagacacagaaatacaagagctgaaaacttaaagcctaagactcaggatcaaaggggaagcgacaaaggaagaagtcagtggaacaatgtaaggacaaagagaaaaagagatgtggggttgcgggtaaactaagcctcaggaccagtggaatgatggtggatgagtaatgcttctggagtgagagtttcagaagaaagggtgtcaagcatagcgctgggcttatgaatagggggactctgagatgtgcctggtgatccaagatgcacaaagctacaagcggaataaacctggagaattatgctctcattagctaactactaaaacccagggatgcctgtattgaaaccaggggcaaacaattccttgcctgccaaggaacaataatctggctgactgagggatctaaatcacagaagccatcagcaagagacactgatagggtagaaaattatttagttgtcaacccagagacctatgtccagcaaaaacattcttcaggaacttaaagattttctcaggtgaatgaaaactaagaaaatccaatagacctgacttaagaaaattgctgaatgttgttctccagaaagaaggaaataatgccaggaggaacttggaccatctgaagtgaaggcagagaaatactgactaactgaagaatacctctaatctcaattggggccctcaaatatgtggactggttagagaaaaaaataaacttgcattacctggtgaggctttcggtgaatgtgctatgtgagaactgcataaaagaggacaaaggtacatacatgttaaggactttacattccaactgaaataatagcaatatacatcaaatgtgatgcctgtattataatctcaagatgaaccatttaaaatccactggatgggacatgtagttaaaacaaacaaaaaacccaaaacaacaacaaaaacacatatacacacaataaaatggatactacagaaatgtacatgaagccaaaacagggccatgaacaaaacagaagaataaacgcagggagaagaaataataagatgcaaatgctctaagcaggccaattaaagggcatgctatcaaatggataaacacagccaagcatttccaatgaaaacttaatatctgagatgaggcatgcagcaagtataacttatggcaaattatgtaacagaaaatgtatagttccctagtatttgtattttaactacctgctaaagtgatatgtggagttaaagtattaaaatgtcacagttctttatactttttaaaactacgaatgctgggagacttcgaattacttgtgtattgtgcattaacgttaccgttgggtagcaatgctgcagtaagggaaggcttctgcaacacgatgaaaaggaatatttcaagggccaggcaggagctgcattgttttgttttctttgataagacattaggagatttggaagttctttcagagcttgattcccagaatcaggacccagtatagagctgtcaatcaatctgggcacacagagcacttatggccactaaaatgtcagcatcacagtacagctcctgtgactctgccattcccacagctttctttaaggatggtgcagctgttcagctacagtggagaaggagcaatactaagtaactattttacctagtgcctttcacaaatcagtaagttttattagccaggtctaaaagtgctaaagccagattatatctatctatctatctatctatctatctatctatctatctatctatctatcatgccatatataatataatattatattatatcataatattatattatattatattatattatatattatatatatgccattattccagtctggaaccaataaacaaaagtccctagttcacaagcaaatgatcaataaaatggttgaataatttttatgtagcaaaaaatcattccataactttgaaccaacatacaatattgttgaatagtaataattgttatagaacaataagcaggcaaaaacaaaagcagaacaagactacccaataataggcagtgtggtagagaatgcagagtggggtctgtgcactgtctgcctctaaagaagcttttcttagctgtgaaggctggagctttgcaggaagggaagtcatatccaaaactcttggctgatgtcctaattcttagcaattataggcagtccaaggaccatgggcatactctaaaggtgaactcactctcttggactcatcctctcaatcaaagcttgacattcagctaagatccattctgtttacctctctgcctagagtgtaaactctgtgagtacaataagctgtccgttttgctcctaggaccaaatgaaatactgcctacttagctcagaggtgcttacagatatgctcaaatcagataacaagtgccagaatctcaacttagcctaactggcaggatgtgggaaagcattttggcctctctaaaccattctaaagatcacttccctttaatgtgtctattaaaacatttacctcatggagtgaagatatacttgttgactgaggtcaatctgaccagcaaccaaattatggatagcagttggttctagttactaggagcataaggaattgaaagataactgcaggtgtgtggttcttgtactggactacagtgaacttgctgtgagacctggaatgtggtgtggctcaaggcctctggcctgaatatcataaatttgaatcattgagatattctccatgttagtctggctcttgtgaacttttttgtatgtacaaaacttcagaattctataccagttttgaatgtgcttcagatcatttctatggacaggcatgaagagtgataaaagaaggaatgtctgcattagagattatagaaataatatgttctctttttttcaggtgaaatttccagtatttttttcttattcctgctatgtactgtctctgtcctattttggccttctgtggctgtgataaaacactgatcaaaatcgatttaatgaaggaaaggttaatttggcttacagattacagtccatcatccaggaaaagccagggcaggagcccagagcaggaacttggaggcaagaaccgaagcagaaacctggaggctgcctcctggcttgcttctcctgactgttatacagttcagggtgacctgcctaggtatagcactgcccacagtgggctttgctccgctgtatcaattaccaaattaagaaaatgccttacatatatagccacacaccaatctaaattggtgtcaagttgacagctatgacatattgtcctataattctgattgtaggaggccccaaatggtctcacttatataaatgctacaggcctgcctatcttctggaggctctggtaagaatctatcatcttgcctttcatggattctaaaaagaagcccagaacctccttttctcttcaaagccagccataactggttgagaattctgtacgtgtaccactggaatgctgacacacctgtctccctgttccatttaaagaagccttacagttatatcaggcccacaggataatccagaatagtcttattttaggttggcagagtatccacctttcacattgccattctgtataagccagtcatttcagagctggtgattttttttttttttttgtccctccatcctcttttctcattctaagttagttagctcgagtcagtggaagaagttagaacaaatagcatcctaggacaactgaagaatttctcttcaatggagcctgcctagtctctagctgtttgtcattttttagagatttgttttaaattaggtgtgtgtggggtggggggcgtgtgcacacaagtttaggtgcccttggaggccagggcatgctggagcgacaggcagttgtgagccatttgacgcaggcactggaagcagaacttggctactttgcgagaggtgtaagtgctcttcactgctgagccatctctccagccttctagctgtttcttaaagctggtagaatgctttttcttaaatccaggaccttgttcctgtgtgtggaaagccaggacctgtatcctcataaaggagtgtggacgtgttgcctcaccttaagtttttaacttctaataaaagataccatgaatgtttttgagttcaggagacagtgtttttccccctctgatgagcaggtggttgaaagttgtgtaatgctgtttttctgaatctaaaatcataatgtccttgtgaatatgctcattaaaatagaaaaattggactgtcttcatttgcattccggtccactcttttgagtagatttttatatctggttcttgctataattatttacatctctggtggaaatgccacatccatttgcagattaattatgcaattatcaaaggcctagagagacatctcagaattcactgttaacatgtagagacaacccataggaagctgaggagctaaagcagagatttcctgaatgtatttctagtgggcaatgagattcatacatgcctttaggttgacagtgccatgcaaccttccccttatgaagggttttggaggaacacaagtgagttgggaaggctcagtgcccaagctctgtggcacatttactgagatctcctttgagccattcagttgcccataaatgctagcgaagtgtatcttcctcagtgccaggactttgaaatgcaacgaacgctcccatgttgtcacatgctgcaaggcatgaagtggaggatacatcactccttagcctgtacaaattgggggtcccgtggagttgtacaaatcactattttcaagccttaccctggaggcctggaagctgcaggagaatgcctgcagctcagtaaggaacagattcacaattcttgtgtcccatgtgactagacatgtgtagtgacagggacatagaaggagtacctgaattttcctagtctctagggtactgaaaaagttccttagagggtgagccctgcctgaaccaagtcttgaaggatcaacaagtgacaactaacaagaaacaaagtgaatggtttgcttggcccatctagcagtctaggacaagaaacagagctgcttgcaaaagcatcacgcaatgcaagaacagcggacacaacctcaaattgtgtccttggggatcgtcttcagaatccctggaggacaccaaaatcagtagatggtcaaggacctgagcataaaatagcaaagattctgtatgtaaaccacttatatcctcctgtgtacttgaaactatctctagattaaacacaatacctagttcaatggaaatgttgttgtcttggttagggtttatgttgatgtgaagagacaccaggtccacagcaagtcttaataaggttaaaacatttaattgtggctgggttacagtttcagaggttagtccattatcatggtgggacagcatgtagacagaagacatggtgctggagaaggtgcaaagagttctacatctggatcaataggcagcaggaagagagagtggcaatggggctggcttgtgcttcgaaaacttcaaagcctgcccccattgacacacttcctccaacaaagccacatctatttcagcaaagccacatctactccaacaaagccatacctcctgatagcactactccctatgagcctatagggaacatttccattcaaaccatcacagctgtgtagacagttattatgctacatttgtttggaaaatagtaagaagaaagaggctgaatctattgaatgtgggcccagccttttttttaatgtttttcatctgtaattagttgtgttcattcatggatgtggagcccagagcagcagagagctcactgtgtgccattgtgacccaagggtgagattcatatggccattggaggagtggggtgtatacacagaacactggacatttctgttccctggttcccctttagtaaaacaggtgtgggagtttcagatgagttatcataagtataatctttcagacagggcctaacataagagcaggcagtacatgctagcaggtattgttgacaagggtgatcacaatcgtattatacaaggttaaaaaaaaagcagtctgcacttcccatgccagtaagtgttgacataatagtgttgtcaaggttttctttgggtttttgtttgtttgtttgtttgtttggaagctctgtagatttataaactttatgtcatcagttttgcaaacttgatgataccctggtaaatctgttcacaaagaaccatcagagactgaggaagacaaatgccattttgaatccatttatactcacaatggaaccatcagatggaatgtttatggcaaactggaatgatttcttcccatgagcccatgtgtaacagccactggcttcttagggagtcatgggagtgggggcaaatgtatttatagaacagtaaacagcttttcaaggcactagactagcctctagaatttgggcatcttcctttagctttaggaatataaacatttccatcactggcttgtggttaccattgaagactagaatattacttgtatgttctacaagtaatattgtgaagaaaagttgtgaagataaataaattcagcaatagtttgtcagaacaaaaagtaatagtgttggcagatccaaagaattgagtcttgttattgctgataaagttgaatccttcattctgtcctctattctatcttgtggtccttgtcatgtctctgaactgtaaacatgagagtagccagaaagtttgattttatgctttaaagtgtaaccaacagggtttcttcagtgatttttttattaaaatgctgaagatttaaaatacaatgcatgcatttttaaataaaattagactttttaaaagtgaaggaagtccatactaagacgtggtttttgagatatgcattctgggcattgtttttaagtgtttcagccccaaatgctttactggaatgttacagtcactgctcattatcttgaattcacttgcaggtcatttgttcttaactgtttttctttctttcttttttttaaaaatgaaaaagtgaatattcaccatgtgttgctctaaaggaaatcagtcacaattgttcataacaaaaggcatgttttaaaatgaaagctctgagcaaagctgctttggtttttagtacttctaccagtacagatgttggcattgtgaacaaacagcttatctttggcgtcactgtaatggtccattccctggagcagctggagatgagattgtgttacaatgaaatgttgatcaaatgcttacactgtaatgaggagttgcaagtgtgacgatgctgtccttagtctgccctgtaacaaaacatactcaatctgtatttttattggtgccacatggagaaaaattgtcctcctttatctgagttggaataaatttgaagtaaaactctaagcaatagggccagagctgtctttaaaagtacaaggcatcctttttctataattctgcagcaaaatagcacctaagattttaagaaacagatgtaatttatttgtgctatcttgtatgtggatagatattaagcaatcctataaagtgatttgctgacttactgggaaggaacaatgaacacaccagaaaaattgagacagtaatgtttgaaaatacacaataaaagagcaagcttaaaaaaaaaaaaacccactgctttttgtcattaactctccgaagaatgggagtaccaaggttgaagtgaatgcagtgagcgctcccaggtcttctttgggatgtcactgctctgggctttctcaaagactttcaccaagctgtggagtgcttatctctgatataaatgttctgaactaaggaattcagtttaagaaaataattggattagtaagggtcattatatcaattgctgggaataccatgttttcatcaatacataattaaagtgtggtccttttatctagtggatgccttgtaggtatatagaatgaggcacagtgggacttgtgggtatctactatacaacgttataagaagtccatgatatactcatacttcacatacattgaaattgaaggtgtaagtctgtgttgatatagaaaaggtgttcacagtagataatatggaaatggcaagttagtgagcattggatgtataaaaacagacaggcttggagatagatgaacacccagagtgtttctgtgacaatatcacaggtagttatttctggtatattattggtcattttcatctgttacctcctgtgtgtttttaaatttttgtataattaacaaatatctcacagccaaagccaccgtggaggggtaccgcgggccctgcagcaagattgccttcaatgttgatgaagcacgtaatatagtcagagtgttagggggtgagggctagtcaaaacaaccagtggaccacaagcatggtagacaatccccagcacactaggtttagttgggaaaagcttataaatacactgtaacctgtgtggtggtccagaggagtgcatatgggtctcacatggccagttcatgttttttggaacactacatttgatggaacctgtgctgtaagatgggagagccatactatgaactacatcattaatgtttttacagtcttgattgtcctgtaaccaactaaatatgttgggctagagctgttaagagtttctgagtgtatcctttcccaaacacaaaacagttacttattaatgtgctagataacaagcatgcaatatgcgtcaaagctatctctttgaccccaaataaacacacggacgctatattaattattaaactgtttggctgatgtttaggcttcttattggctagctctcatttctattaatctatgtattgccatgaggctgtgatttacctgtaattcggcatgttactcctttggcagcatggcatctctttgaggcctcccacccccacccccccatcttccttgtctgggagccccacctatactttcttactggctactggccaatcagtgttttactcatcaaccaataagagaaacatatatacagaaggacataccccatcagctatcagcaatcagtggatggtcatgttactatttcaccttcttcaatataatgtttttattaatacttttgaaaatttcatacatacatacagtatttttgatcatatttaccatccacttttgccttgaactccttctgtgctactctcactccctgacccctcccaattttgtatgccccccctgtttttttaaataacccatctgcactacctgtaaactcacaggtagtggggatccatccactggaacttagttgacttaccatagccacacttttttttttttttatgcaaacagcaagaggctttattgcagttgtttaatgagctaaccccattagcagctaaccccattaggttgggcctttcatccatccaccatggaggatggctgggaaaagaccctgagaaaccccaggacaaagatcttataggacagcacataaggggagtgtctagaggtatgcacaggctcaggattggtgtgcccccaggcgtggaggacttgccctgtgttgattggtcaactggttgttatggcccatagggcctcccaggatggttgctatgctctacatgtcattgctgtgcacttgtccataaagcacacccagagccataaagcatagtgccaccagctaacctctgattggttccttgccacgaggcagggatctgacctcctagtgaccaaggcaaggtcaggcaagcatatgttaggctgttacagctgcagggccacactcttaaaaaaaccacaccagctcctcctttctcagaagccatcagtcatcaatagttcctcatgaggggtaaggctctgagccctaacctgttccacattggaatgttaattggtctcctgcaggtgctgtacaggcagccacagctggtgtgagttctccacagctggtgtgagttcttgggtgctgtgctcctgccacctccagaaacaccgtatgactccagctcccccccatctctgacactcattctgccccctcttcctcaatggtccctgggccttgggagataggcatgtgacacagatgtcccacttgtagctgagcacttcacagactcttattctgtctgccctttgaccagttgtgagtttctgtgttaaccactgtacacacatacttctgtgttaatcactgtacacacacacacacacacacacacacacacacacacacacacacacacgcacacacgcacgtgtgtactctcttctttgatgaggactggagctgtaccaatctatagatacaaatatccaaatctatagtctatagggcagtttgatgctgtgtctacttggcaaaaataaataaataaaattagtagtttcactcttgggcctatgagctccctaaccataggttcttagccagatttatagtaccagggatgtaatttcatttcaccttttcctgaccatactgaaaaagacttccaagtgttgttaatatggcaaaatgattctaatcccagaaattggcaagcatggacatgtgcactgcagatctatcttttgtgtgcgaatattgatggaaaacatttcaacaatatgccatcaactcgaatctaggcacttaataaatatctatcgtgacaaggttgattccatcacaagagtggaagtgtagcttgataacagagaaggctttctgcatattaagtggactaagtggaaaaatccttaggatcatcttaaaagggaccgggaacactttgctaaaattcagtaactggttatagccatagttacttgactacgtacttgacaaaacccagcaaactgtattcttaggaagaatttgtttacttcttgtaaatttgtcaatttaactttaaaaagaaatataatcacattgtgataacagaaaacaatctgatatgccttcctgaatacattaaaatttggtaaaataaggggtttaggagatgactctgtgggtaagagctcttgttgcccaatcttgaggatgtgtgttcaattcctcagcaccctgccatcactgaatacaccagtaaccacagcactgggaggaggggctggaggcggcagggagagacaggagaatgagggtccctggggcttgctggccagtcaaggtaactgggaggggacaaatccaggttcagtgaagagactctgtcttattgggatcagtaactcagagagtgatagtgcaggatgcccaatgtcctttatctggcttcccctcatgctcatgcatgcacgtacacacatgcacaccaaaatttaaaatttggtaaaataaaaataaatagaatatgtccttttggatacttgagttaaaatatgtggaaactgtctgcaaattatgaagcattgggccttcttggtttttaattgaaatgttgcttttcagttaaaataagatgggtgttagaggtgcacagctgtaatcttagcatgtggaaagcagaaagttcacaagttcacaagtttgaggtcagcttaggctaaatggtcagaccctttctgtctctttggggaaaaaaaagatgctgatatctgtgggaaactagtcttcaccatcctcagcgtgttcattcttctgaattcttcgtgcgtggagattgttagcctggggaagtcttctgttttttgacacattgttaagattaattgagcctctaggttttacattttctaaaagcaatttaggtatgaaaatagggacagatttttactgtcacatctgctgtgtcccctttctagctcacagccaggtctagatgttgttggagcagtggcactaattgcattttccctttgcttttgccaaagaaagggagacatatttatgttgttagtgaggaaatggatgaaacagaatcagcactctaaaagcattgtgagttacaaatcaagaaagagaggggaaataaatcctccccaagtttgcagaatgtaaaaccaaagactgtttaataggcttcgaataagtatttgtagccagttactgtgccctcaattccatctccatccatcctaggtcactttattccaatgacctcaactttgtctcatccatatctctgttaacaccagtcacttctcaggcaagaacaagtgtgtcccttgtcacactccatgtgattctgtgttgcttattttcctgtggctccacaagaaaataggaaaaggtgcctctctggcatccagatttaaaattgaaatttaaaatttaaaaacggtggttctcaatttggatttggtaaaatgcctcaaatgtaacccatttcactgttccacctaatctcctctggcctcaagtagaaccttccctcacagtcatcaggcgcccctagtctccagtccctacccaaaacaaaatcacagccctattcctccagcatttctgcgatatatgacaagagacctctgtcctttgtatgtaacaagcagcactcacagatgcgcacagaatttctctctaatttttcctcccctcaaacagtggtcaaaagccttcctttgcttctgaatgaactcagaggagcctttccttttactcactcttaaaaaaaaaatctcactgtttcatctgctgaccagggatgctgtgatgttggcaaagactccaccctcctggtaggcgacttccttcctcagtgagaatgtgggcaggcaggcagtcttcctgcaccttgctgaggtctgacctgtaggggtcaaggtgagaatgaaggagaagcaatgggaatgttttgacttagttgtttggagaaactcttacacaatttggattcaggagggaagatgggagtccattcattgtcaagaaaagcttgaagaagcttggagcacacaatagggaaatgtgatatggtctagagataggtcagccttctctaaggattcagatttgagtgcttttggcatactaaccttagcaaacactgtaggggtgcatgactaaagtgagagaagaatctcaggcacactagggatcaatcctgatggatagaaaataccctcactctgtgcgatagatgcccttttgacttgaaagaaatcatctgctccctctgaacactgatttaatactcattgacaagcatttgggtagggacttctagtttctattcctttgcaggagtttttaatgactgctttgggatgaatagggaatattaggaaaattttaactataactatcttgtattcagagtttttgtcaggacctctggctccaacataaatgcacagagaattaatatgaattataaatgcttagtcagtagttcaggcttattactagataactcttacaacttaaattacctctctttcatgttggacctcctgtttcctctctggctggctggtgactctctgactctgcccttcttctttccagtgtccttagtctggttctctttattgaaccaatgacagcaccatatattgacacagtataaaggaatattctacactatctcatcttcaactccatcagagatctgagcaggatatattacttgagtaaacagaaagtgcagagcaaacaacttccaaaactatagaaatgacagaaacagctggctgcctggactgtcacccaagtttcctctgcaacgttggggcatccatcaagcccactaatatttttgaacacatcaagcctgataatatttttttaaaaaaaaatgagacccaggaagatagcaagtttgaagaatcttggtatttatgaggttgatagcaaatgataattagcactctgcctagtgctcaatgctcagctgcttactcagctgagatcagtgaacctctctaagccttatttccacatctgtagaagaagataatgatccttgcaatgattagcaatagattgaggaatgctcccctaatacttaaaagatacctgggaccaatgccctcgctaggcgtaagctgccactccacactcacagtgacagtggcactgtctgctgaaaaataggctttattttaagggcagaagttttcaaaaggtgtgcagggccaatgagatggctctgtggataaaggtgcctgcagccaagcctaaggccctaatttagacattgagagcccacagagtggaaggagagaaacaagccctgcaaggtggcgctggcttctgcatgatgcacatgtacttgcacacaaactaaaatttaacttataaaaagaactgagagtgaagaagaaaaatccttaccacttcctaatacatgggaaatttagctccatgggttataaaactccatttcctactaacaaattaaactacaggtttaaaagccatgcctactaaatttcagttgtattcagtttaacagcttgcatgagacagaaggtttcagagcatctagcccttcctgttttctgtggcatttgctgtttagctcagaatacagccgtgtaaaaggccaccacaaaccacaagctctcctctttctaggtagtaaaaccttactatcttcaagtgtcttggaggctaggaaacttgaggctgtgtcatcctctcagccaaaagaatccctaaaatgtgttgcttaggaagctttaggtcgggacgttagcttcagagttctttagaacgttccctttctctcagactctattggtttcagctacttaaaggcaaagacctgcctcaagggacattagcagttgacactggggtctccagatatatatgctgttcaacttgtttgccaggcacagtcaaatgtgtgtatccctgtgcagcgtgttgcatgctgagaacagtgacgtgactgcagtgattcaaagcagggttttaagtgaataaatcagaggaagcctctgggattagtcccaattgaaaagttcagcacgaccagggaaggttgcattgctgcgggattaaaaaatggctggctgtggagaacagtattcatgatccagccacattctgagtgatggacagactcagccctgtgccacccatctttcctccaacacacagactcagagcggggatcgcaacggcatgctttggaccagctttccttctcagaaaccctctgcctgattgttaaatgaatcctttgtttcatacctaccaagttccagaaaggcctggctttaaaatcgctacagtctaggggaagaagatgaagtgagactctccttccatagattagcctgggagcgagacaacagagaaggccctctggatagtgaaagactagagcaggatcaccctatgatcaaggcacagggtatgttaacaaaaagaaacctgtttgtgtggggcctttactgtctgcaagcctattattggcaccctattatttgatccttataacaaaggaaatgtgtccccacttcacaaatgaggaaagtaaggcctaaaaaagtttccggattgatacaaggctggaagtataataatctgatttcaggtttggtgctttctttgattatagtcctgctgagtgctaatttatggagattgtatagaaaatttctaaatacccatgtgttagtcagattttcattactataacaaaagacctgaggcaatccacttaaaatgaggaaaagctcatttgggctcacagttttgaaggtccccggtccgtagttatttagccttgtatttggaggcagtgtattatagtgggagcgcatggtagaagaaccctgttcatggagcaaaatactgatgtttcacagccacttcaagagtacaatcaccagtgatataaaacctccttccttagactctgccttcaaaggcttcctcacctccacaacacccatgatctggaagacccaagaatgtacatgcaaatagattctcaaacttgaacattttcattttattaactttatacattatgtgaatctatcaattctttttactttatacatggtttgaaagtcatcatgtattttcccccttcttgacaaatgcattgaatcttgcaaggaaaagagtacacaggaagagagagacgcatgtaattatagaaaataatatttattataatcttgaattatgacctaggagaagttcagtgccaaagagaaagtgccaaaagatgaatgcttatggtgttgagatgtatgagaacgagatgttccaatctcattatctattctatctaaaagatataaaggagcaaagagtagggattaaaaagatatttgaaattaacttaatttctttcctgatgctctgctttgaaaaacattagaaagtaactactgttcgcatctgtttacatgaacctgactaaaggtatggactgagtgtaagcctttctagccttggactttctgtacatgaatatggttccatgcaatggtgtgatagtttttagctattatttaaaatgaaagttgagaagggtctgaagatctatatccccttggtaaatttcacattgttgctactacctgtatagttggtaggtaagagttccctcaaaggtacacaccatagacctctcaataatatagagtggagtgactggtaaatttgtgagactcataattctctttcatcctaagtttttggtagctagacttgtgacactacacctatatccattgcccatctgtgcttgaacagtcccctctgagctctgtagatgctagtttaattgctccattttgtactgtgggggtaccagcaaagcaacaatgctgaactggatcaaacaccatactcaaagcttgccatgaaaacagcaggagatagtgggctgggcttctttccttcctgctttctcagaggtagccacctttgaagcactatgggatcagagccaaggcccactcacagctcttttagtgatgtataaatggtatcaggaagttttcagtgctttgtgaggccactggagtctgggtgcttcaggcttcaggcaaatgtagcttcaggggtgtgtttctgtgtgctttctgcctactatcaaggatagaaagctgatctttcatccataccgtgtcactgggatggaaacattccagtttagagttagaactggggttaatatttgcaccaagcatcttcctttccactgaagtgtattcctattactgttctgttctttcctcctctgtttgcattccagggccttgtgtttctcaccatgtgcacattttgagatccaatactatacatagtgaaacacatacatttcaagtgtttgtatttgatgtatgcttactacacatatgcacaccttgtctctagcacacagacaagagtggggcatcttctgtgttcctcctggtcaggacaaaactgtacagtcagtttgggttattttcactggtttgggttattttcacccaagaacaagaccatagtgggcatattggagtaggcctttaatcctggcactttgggaggtagggacagccggtcaaatctctgtgagtttgaggctagcatattctacatagtgagttccaggccagccaagatagaaagacctagaaagaccctgtttcaaaacaaaagaatatgaccatagagtacatactgtgtttgaatttttctacccgggattatgcagtgactaaaacacctctttgagtaaagaatgcctttgtgtaaattatatattcattcatttgtggttatatgggtgttttttttttacttgggattattaaaaatagcaaatcagtaatatttctcttttagtagaattcagcattcatctctcttggattttcaatatatccaagagtgagatggcttcttaggtagtgcataatttttttatgctgacagtttctcctaaattgatgtaccagtaaacacccctaagctcacgtgttttcagagtacaactttcttttgctttagattagtgatgccagttaatatgggatgttgagatatttgctacccatctcagattatgctcataaacatacatgtgtttacatttctcacttatttgatatagattgacagaaacttgccttgtcagtgaaaaatgccacagaaatgaaaaaggcaccatccattaattttcaaaaatccaatagtaatcacaataaagtttactgaagatgtctagttttatggtgtagaagtgagcatgaatttcaactgcacacacataatatttaattcatagaataaaatcagaaaggctatttgactggggtttggtccttcagatccttcctctcacacaattcatttgcaacagtttgaattgcattttatgccttcaattttctctaatttgttcttgattgctttgagaggaagcagtaactcaatatattaaaccctgcttagaatcttcagcactgagcattttaattctgtcaagcttgtgtcatggaaggctgaaaagagatggagccacagagcccaggtaacttacctgtgtgggctggaggcaatataactaagaataatattcctggtattagaaaacgaattctaaaagaggtgcccaggatcaatctagaaaagcctgttaggctagatttccaaataagtcttcacttcccttttggacagacttacttatttcattcagtcattatcattcattcacacagtggctcaagaaacactgaatagtgtgtggcaggttatcctcttgctactgggcatatagcccagaacaaatctgattttgttcataaggaacttacatttttagatggggaagaggcaagaagatatagacatagagattagagtgagatagaagtagagatagcaagatcatgtgatactcccagaggaaatatgaaaaacagggtaagaggcctggaaaggcaggcagaatacaggaaaatgctttttggcaggggggggggacacgacatagggacttcagagagaacagccagtgggacttgtgcaatggtgggaaggaactaagcagtgtggatgtccactagaggaagttttttaagagggttaggacagtatctagatggcctgcagggcaaagaggcctctggggttgaaagtttagaggagaggtcagcaggaaagcagagactaatcagggaagctatggtcattggaatggccttagcctttttttcaagagaatactcaaaatccaaggattctgaataagaaagcaatgagtcaattttcaaaaatgattatcttgaaaattggttaaagtggactataggggaaaggcatggaataaaagtaagttgagacttctaactggtatggcaaaggtgttttattttgtgggatcatcaaaatcactgttctttaataatttacactaatacctggacaccagacatgggtaaataatgactggcttattaacaataattagtaatcttctatagatattttaaaataaattctatgtctaagagtctttcattaccttctatttttatgaacatttttctctctgctgttttaagttaatataccattccttgcagccatccacactggacacacctgaaccttggtcacttttgactcacccctctttatcctctgagtaaaaaggtgtctcccaaataagtcttctgctaatcccagcctttagagaatccttctgtctcagagttaatcatcagattcccccataatctgtgcaaaactcatcaagcaacagctatcagtttttaaattgggaccttgatttatattggctccggcctttgttcttccatattgctggcaactgggccttttgagatttttttttgacaactggccctttctaacaatatcagtaactgatttataacatataacatctagatccgtatttaatttacaaaactgcaataaggcagtgggaatttggagtgctgaagtgaccgggttgaatagtgactgctccttctatataaaaagtcatccatgaaaatcctacctgtccttcaaatcctgtctcataccactgcctttatactgccaccaatatgccaatgatttctctgagtcctgaaacatcactgcacggagaaacagcagtaggcatgctaaggccttgaacccacagaggccaggttctctgtggttgttacttcacctctggtcttccctggaaattggagtcagtaattcctaccacatgaggctgttgtgaggatttaatgagttatggcatcatgtacattagttctgtaacagttatgaatacttagcattatttttaacatcaggatccatatttagtagacacttcaaataaaacctgtttgagatgaaggggaaagacatatggactgaggaaaaggagacctggatagctgtgcaatgctgaatgtcaccgatccctgtatcttactttcttcagctggaaaaaattactatcagttcatagtggccacatctgtatctaaaagtcaccccaaccctaccaaaactgaactcttaacccctgtgtacctttcctatctacttgatattaccatctaaattacccatttctttgaacacccaaacttaatctattggccaatcttgctgatggaaccctgattatactgagtccatctacttaacttcactactgctacaaccctagtccagtactctgctctctgcagcagcttcctaatctacccttgccctctttccactcattttccacatagccacactggtgttcagagcataaaccaagcttagagtaatgctgtctgccctgaagtcctacttccttgggggctgagatggatcactggagctcaggagattgaggttagccagagcaaaaacacagtgagactccatctcaaacaataatatataaagcacaaaccgattgttcccctgtctaacactcctcagtggtttctctttataggatgagatactcagttctttgccccctagggccactgtccccatcactctttttccccctgcccctccccagaccagccttggcccttaacattggttggaacactcagcccccagcagtccacatgacttgtcaagttataacctaactctgcctaagtgcctcttctatgggtagtgctctacacaacatcctattcttaccctaaaggcttgtcaccaaaagtcccctattttgtcatccccacccagtagaaactaaatgtcctcacacaagtctcatttcctaagcacagtatctggtacacaggaagtaggtatgctgggataggagacttgactgaataaatgaacaaatacaaccactcttttaatgagatacaaagctctgtattaagtacataagccaaaaccagttattctttaaatgtgtctattttttcctttcatttaatccacataccgagtgatcattagcgatagaaatatgacaacttaaaaaaaaaaaagtcagaagtcttgttcctcccctcagccttcattttgctattctcttcctcggtcctcccagactctgccttagtgtaaatttccctcgtctctggcgttttccctgtaggttccaaccgccctatgtcttattctccagaccgcagccaaagaacagttcagctgctcccatacccctctgccgttccctgaaaacgcctgggagttttccttgctcttaggaaagaccagaacttgctcttgtccaccaccaggctaacacttctggttcccgtctgccacctagctgggtagcaggggcttcccgcttccaggacgcttttacaaagcgccaccaagttgcctcctttagatcttagaagaccgtgttcccttccctctggaagcccatccagagtaggctgtgctccatcataaagccccgcatcgccacgggcccgtctttctgagctcatacttgcttcacaaacataaacttctgaatgccggggccttcacaacctgtcttcccgcgagcccgcgcccagcgactatttgcggaaggaacgaactgatgagccgaccaaccacagctcgcccttccccgccgccgctgcgccgcagtcgtgacgcgctaagctggcgccgcgaggacgggcgtgtcggggcgcctgcgcgacgggcacgcatgcgcagaagcgcgagcctgctgacagattctcgaaggcggcggcggcggcggcggccttcggccgcggggaatgggagtctcagggccctgactgagcaccgcccccgcctccctgccgagacatggctcaggagaagatggagctggacctggagctgcccgcgggcacgggcgcgagcccggcggagggcggtggcccgggcggtgggggcctgcggaggtctaacagcgcccccctgatccacggcctcagcgactcctcgccggttttccaggccgaggcgcccagcgccaggcggaacagcacgacgttcccgagccgccacggcctgctgctcccggcctcgccggtccgcatgcacagcagccgcttgcaccagatcaaacaggaggagggcatggacctgatcaaccgggagacggtccacgagcgcgaggtgcagaccgcaatgcagataagccactcctgggaggaaagtttcagcctgagtgacaacgacgtggagaaatccgcctccccaaagcgcatcgatttcattccggtgtctccagcaccgtcacccacccggggaattgggaagcagtgtttttcaccgtccttgcaaagttttgtgagtagcaacggattgcctccaagccctattcccagcccaaccacccggtttactacccggagaagccagagtcccatcaactgcatcagaccaagtgttcttggaccattgaaaagaaaatgtgaaatggaaactgattatcagccaaagagatttttccagggcatcaccaacatgctgtcttctgacgttgcacagctgtcagaccccggtgtgtgtgtatcctccgataccctggatggaaacagcagcagtgccggatcttcctgtaactcaccagcgaaagtcagcactaccaccgactctcctgtgtcgcctgcccaagcagccccccccctttattccagtagatgaactttcgtctaagtgattcaccagtcttgagcccccctcccccaatggagagacagaatcaagttagagcaagcactgaactttgtcgattaagttgaggctgtttcctatttgactcttccccctttttttggaagttcctgaaatgttattctagagaatttctatgtcaggttcctgcggacgcccttaaattcagtgtagtaatattttcggactttttatcaataagtgtgttgaagcatacattttacgctgctaatatgtctaaatacatatgttatcccttgattttttaaataattgagagctctatttatttatgggattattaagttctgatgaaaatataaatgttgaatttcagtttagtaaactgatgttttaaaattccataattcatggcacactaatttttaatgttttcaatgattgctgttttccatctattgaagaacttacctacttacagctttaatgaaaactggtagtcatatcagtccattggttgtctagcttacccaagagtccttggatgtttaatgtcctaggcacaagataggaggggaaataacaaaaggagaaattatagcattttgcagcaaatatttttaagttaagtatataaaagtaaacatttaagaaggacattttctaacaaaactttaatagtaactagtaagtcacaccaacataactacaaaaatgaaaagtttctttttgaaaacatttttaacccgaaagttcattctcttgggtataatcctaaacattcaatgggacagtgccttgtagtcttagctcactgtagaaggcaaggctaccccttcagagataacactggtgaaatggaaacatgtgggaagccctattgactgttgggagaacacccagacagacaatattctctcaatcattgatagactttaaactatccagtcatgttcttaaaattcctgccagcaaaaagccagagcagcatttgcctcgtttctgctctgcccatctgtcacctttccccttgctcaggaaggaagccgctgtttccttgccaacaggtacttcccacctcctaccaagctaaggcatagctagaccaaggtacctctgatttggatttctgacagtgtgatacacatctctgtggttggagctacattgacagcattggaaatgttacttaaaggcccatggtgtacaggagatcagtggatagtcaacactgtaattcatcacttaggttttcttcaacgtggaattatggggtgcttttctttttcgattaagataaatagtaaatggcttttatattacactttataatacttcatctttcctagatagttaaggcagagaggcagatgaaatgagtaacagatcaaaaggaaaaggttaaagaaaataatactaacacttttaagaaaaatcatgacaaaaattcctacttactttttaaagtcgttgcctacagattttaagaattatatggaatttttacaactatgagaataaatggaactggtcaactcttgacagttgcatcaggtttcagtgaaatgacatcaagggtaagactgtgtctgtatgtttaacattttctgggtaatagtgtatttgtccttacatcctaattgttcctcatcttaaacctatatatctgagtttcctgttgggtatcttgacctgcttccagaggaactttaataactgcaaaacaaaatttactgccacatttaatgtgttcttgtaggttgatgtcatcgatgcctcatttcctaaactagatgccatgacacatctgacttctttctgttacagtgtgaccccaagttctgtcagtttcttctaaactgtatctctaattctactccagctccccttgtcacctgccttcctgcgtcttccctcccttttggtttggtcctcacactggctcctgaataatcttgttacactataaacttgatgtttttcacttttgtaccccaaaactatgtcatagcccttatagttaaggtagttctgtaacagctggctattgtgatcttcagtgatctggctgttaagtactaaagtaacttcagttctgatctcatcttagtgctcacttccctcctgctgctacagacactagactacttgataatccttaaataggctatattcttacatggatttacgtttaaaatctctgtgtgtgtgtgtgtgtgtgtgtgtgtgtgtgtgttgcacacacactggtcaggacagtttgtggagttcattcctttcatcgtgtgtattctgggaatcaatcttaagtcatatacatatgtacatgaagtcagaaagcggcttgtgtgagttgattttcttttcacagtattggttccacttggtgttaggagtctaaatttacccacagagccatcttgattcagcagccctccctcaactttttaattccacatgaactttaactgaaaacagtgtgtatatagtttataaaatacttaaacaatgtatacatgtgtatagtctaaaatctgccatttactatgtaaacttcattatctcttcctacaggtaacatctgctgacagtttggtgtgcactctgcaagatgcattgctccccatttccctacagggaatcagtatgagtcggcagctctcttcatttcttttaccccatgtttagtcactcaccaagtcttactgattttatctcctggaatctaactcctggttttagtctccgctacagcaagatccagtctattgtatccttcttgggcttctctcccagtggtactcagcatactcactcctgtctgctatctgttcatttgctcagagttgccctcttagagttgcctatttcctgttcttatgagtataccaaatgtatcagttgtggcttaggaggccttgaaggattggcccttgcctcttcccttgtttttctgttctacccttggtatagctagctttcctcttttttaaaaaaaaaattgtatttatttatatgtttatgggtgtttgcctgcatgtatatctgtgcaccatgtgcatgcctggtgttcacagaaaccaggagagggcctcagatccaatcttctataactggagttacagttgtgagctttcatgtggatgctggtaattgaactcaggtcctctggaagagcagccagtgctcttaacctagagctgtctctacagcccccacttctgctttttaaatgcctggtattcacttttatctacatccttttgccaggtcattttcctacaatgtattaaagcccttcttttccttaactgctgcttttttatgggtggtaaatcttaagtaagctaaggctttaagagtttgtatgggcaatttgcatcaccatagcaacttcaaccatccctccttagcacatggacatctgcttccaaaaacacattttttaaaatattagtgtccctagttcataaactttgacctaaagcaattaaaagcacttaattaaaggtccattttgtcataactaataaacttctgcagtatattttcttttattgtggctacttaaaatatatattgtgaatgaaagaagtcacactggttaccaaacccaaaggctgctggatgctgggacctttaagaatacttaaaagtgcttgccctccagaaggacctgggtcaggttgccttccattcacattgatcacattgattcacattgatcagttcagcccattgcataacctacctcaagagaccatttgagatggctggcaggaaaacacatagcctgaacttagtgaaagactggggttttttccctttcattttctggattagtagaagattagagagaggaaattgctataagatgaggcagggaaggcattgtaacagacagtcctcagtgggtatcagaaaataaagtgttggccttggaaagcagaactagaaacatcgatttcttctataacaacagaacgacacctgcagctgttggtttgctcatgcggtggtttagggttcagagttgtggtggaagagtttccatatatatgatcagcagtaagtgggctttgcatctgctccttcagtcttgtagttaatgaggaacatggaatattcgagggcagggtcaggagtgaattaaatgattaatagcctaagaatgtgtaaaggagaggcttaggagtgaatggaaggctagccaggccacagcgagttccatttgaatccacacaaagaagccagttgaattgcctaggtttgggagttagctaagtaagtactagttaaagggccctgtgacacagtcattccttggaaaggcattggggatggtcagaggagtgcaaagtgatgtcccacctattcatagttgaaccttatagtctgtcacaccaatgtgtatgagagccggttctcgttgtggcacttttggtatattttttcacagatgattttatttagctaaaagagctgcccgagaggcagacttccatccaaattccactttatatcatattgctcctaaaagcccagacagtttgtttgttgacatcgaagtaaattttttttctgaaaaattgagaatctttatataaagtgtgatgaagtactttctgtgtacccaacatttttagggtctggctggttttcaatgtaatcatttcaccatttacccgagatgagtttgatatcttggcctttgtttttaaataggaaataggggtacattggtgaggacatttgcctgggagtcctaagctggaagctttggtgctggttgcagtgattatgagcagactgcagatccaggttgctgggttcgggggcggggacatgttgcacggggggaggctcagtggatgcaaggccctaataacagtgctgaacaatgaaggaacattcaactgacagctgtcattattgtatgcttctgagcagttatttccttctgtaacttccgctggaatcaggtccagctcactggaaatgcagaacaagtcttattcctctcttttagccatccttgctttatgaaaccagaacactgatccttctctcatggctgctgcttgcttgggattttagaaaccttggctaccttcttcagtgaaataaggctgtcagtgacctggcagctaaactgttttcaaatgataattctctgaagaccctttgccttcccaggtgggggaagtcagactatgtaataactcaacttttgttgacaataataaaagtgactaacaatattatatactatttacatctggaagatctcaatgcagcatttagtatgggctcaggcactattttcatcacacacacacacacaaacacacacacacacacacacacacacactttgtttaatccttctgataaccctctgaggtggatactatgaatttactatgactaacagatgagaaaaccaagttcttttttaaaatcccagtttattttttcccttttgaatttagttcctttttgttttttgtttttcttggcactttattttatttgagaagaccctgtttccccaatagtttatttgcttgctaattttgttagtgctgccattctgtttttaaattaaatgatatatttctttaaagaaacaaaatgacacatttaggcatcattattgtgttacaggaaactatcaggaagattattttctttcatcagaggtggaatatttgtgtgtatgtgaggaaatcattgcagagctttgcattttaaactgattggctatttgaaactataagagatgcttgaaccctctactcttggctttttaatgttttgtctaaataaatatgacttgttattctgttgaatggatattcatagattttgttgtatttaatttaaattgattcagttgtttttacatttactattcctatgaaaccaagccaagaacctctgctattaaaaaagacaaagaaagaaaagggggaaaagcccttttgtgcacatttaatccaagcactcaggaggcagagacaggcacagatctttgagtctaaaaccagcctggtgagtatagcaagggcagaggtatatagtgagaccctggctcctagaaaaataaataaataaaacaaaaaaacactgtaaaaacttctaaaggaaaacatggaagaatttaaagatgatcccaaacttcttataaataataagatccactggtttctacagaagcgcctccactgccccccccaagacatttaaatgtggaggactcagtctttgagaaagttttctcatttttaactttactttgtagaaaaaaaatactacctcattgttgactaaaaaggattcaaacaaagaaaatcactctttgcttgtatcttagaattggtatttggcatcaagagccacatcatgtcccttactgaacttttgaaacaaacccattgaagacatgcccccactttcttccttgtttcctttctcagttttcctaaataggtaggctggactttatttgttttgcaaggtttaccgaactgtgtctgtgtctgtctgtgtgtgtgtgtgtgtgtgtgtgtgtgtgtgtgtgtgtgtgtgtgtgtaagagagcacatgtacttgtgaacacacatagattattgtgctttttatagcatgctttatactttgatttttaactcctcagatctcaactgctgccctttaagtgacagctataatggatgtggtagctgtactcacaatcctttggttcctgatttttttttaaatttgtcctttttgaacttctgaaataaatactggtagcgatatacaaatcactcgttaacaaaagctaaggcagcatgcttcaaagtgaaaacccgagagcccatcttcactgtctgtagtagtgagacaggaccactgtggctcttcttccagttgcctactggggtccctgtagcctgactaccctctaaggcttcgctaaccaggcatctgtgaaccaagacaatagagaaagagcctttatgcccaagtgaagcaagatggttatttgaggtaatcattcttccccctcacttaaaggacaaagaaagatttcagtgtggccaagcaggatcaccgaaactcgagtgacaagtggctattcaggtcaatgtcttcccctctgagggagatctatgagctgtcactgagggagcaggtatttcttttagcatccgtaaatgtctggagggagctgtcacacagggctgtcctgtgaacagagtgacagtatggctttcttgcacatttgtttattctttgtttcccttccttcaagatgtaaagtcaggatgcgtttaagaattacttaacgttactctcttgttggtctctgttttgagtccactggaggaggaggtaacaatgaaagacaatataatattaagtaccaggtgacttggggtcaagaattaaaattcactgttatcatttaaaaagaaaaaaaaaaacaagcaaacaaaaaaaaaaccccaaaactcttgcaactgaaattaaaataccctatctttctcaaggcctcatttactatgctgcttactacagagacttctgaaatgtgcttgagttgcacctctaatgactaccacttaattctaagattaaatcaaagcaagcagtgtgagagacagctcttcctcctccacatagcccttggattccaggactgcccacacagctgcccatagttcccgctctcacatctgcccgtgccttctgacaaatgtgcctgacctctccctaacatgactcttcctcctttcttctacaccccagttggccctttaaccaactccttaaaaacttacctaaaggggagcagtggttctgatggtccttggtcctcccagggcactttttgaggatcgtctcatcaacaggacttctccttatcaaaaccacagcagactgagttactatgggcttccttgcctctttcccatgcaaaagtcagaactgagtcttttacttttgcccctaagacctgagcacagcacattaattacccaagctcttattaagtggatgagtcagtgcataagtggatgaatgagtgacacatctttgtttttgattcttgtgatatttgtggggagattctacttcttgaatcgactgtgacaacaactgattgaaaacctggtcattaagcacttacttgggaacactgtgtctttaagtgagaggaatgcagtaagattcttggtggaaggagtctagtcacgtggctaagctcttaatagcttcctaagagactagaagttcattcattaagcaattttgatttggaaacctattatgagcctcccactggctagtctcttagggtatattcatatgagaagccaagctccctggtcagcagaacacatatatattgtaatgggagggggtgttctgtgtgtgcatatatgtaaagtgtaatttgttaggtatttagaacaataaggaggtgtaggaggcagaaatagatttcttgaaagaaaaaaattatctgtgcagaggttagagcagtgatgggtagagagttccaaacatggttggcatgtgattattggctttgattttgagtgaggagaagcatagaaatgacatgatctgttttaggtttttgtaagggactttcttgcaaagttgagaataaatttagggaaaggggcagggtagaaaagaggctcattaggcagcttttttggcaatctaggtatgagacaatggtgatttgggtaaggttgatagtaggagtcaaattcaaggtgtattttaaaggtagagccaacaaactttgctggcaggttgaaggtggacaggagcaagagaaatcaagggcaattctgtaggtctgaacctgagtaacagaaagcattggagccgccatcagcttagccttggaaacctgtgagtggagtgggattgcagggctatgtatggctgtggaaatacaggtccttggtatccgcattttggatgttttggtttttgtttttaaggtgatctttaatagacatccaagtgggaatgaggtcaaaaaagcagctagatgaccaagtctggagttcaggaaaaagggctacattgcaaacacacaggagtcaactgtctgcacgtgtatttaaagttgagactagatgagtctgctaaagaattaggcattggcaaagagaataataactatgcctcggggtacatctaaggcttggggtacactgtgacactgaaagaccaggaatggggagatgaagaaggagcaatgagggaagtaggaaaaccaagagagttctgtaccctggaagccatgggaagaaatgggtatggttattgattgtgggtgtccactgcagctggtctgacatgtaggatgagaattggtcaatgagctctgttcacggaattcggtgacatttgagtaacaggtccctttcttcatgagagtcatttcagtggggcactgcgggtgggaccctgattagagaggcagacatgaagaggatgatgaagagaatggaaggagcgtaaccagagtcagacgagagaaaagtcagatggaggaaagaaaaatgaaagaggttcagacaggaaagtcagatgtgagaaagagcaacagaggaaagacagacagagggaaaacagacagaggaaagacagatggaagaagttcacacaggaaagtcagatgggagaaagacagaaagaagacaagtggaggaaagacagatgaaggacaaatggatggaggaaagacaaatggtagaaagttagatggaggaaagataaacagaagaaagacagactgaggacagtcagatgggggaaggacaaactggggaaagtcagatgaaggaaagaccacagactgatagaggaaaaacagtctgaggaaggtctgtctgaagaagggtttgaggccagagcaactggagcaaaaggtcacctcctgcttccttccacaagaagttattataaagcacgtcacaggaaatattctctttcacatatatgattgtagtttcagaaagaaatacacaggaaaaaaatcaactgacagttttctcccatgtccactttggcattttgtagtggaaaaaaaaatctataaattagtgtttctactgcaatcatgacccaactgttagaactaaaaccttatgatttgtcttcacatgtgttgtctgattcattttctcctttatcatttatttttctttatgactttttctctacttataaattaaaacagtttcatggcacaattatttctgtaagtttggcccagtttcttagcctagaggcattttcttctttggtgagtgctgtgaattttaaagtagttcatgatccgctttggttttatttagaaacagaggggttttttttaatccattttgaaaattattgcttaatagtgaatgtattctcatagtaaagtatcagtagatgtcatctggagcatttttttccagtctgttctgatcctttgtagatgacttaggaacagccagaccatgttcataccccagaaggcattcttccttctgggattactgatcttggtcctgaggttacattttgatctttcaaactgcctgctctgtggtgcatctctcgactcttctcctgtgggtagtgtgagttccctctgcatcgtaactgcctactgcctgaacccttaatttcttgttcaatgtgtatgtctgtaaatatgtatgtctgcatgtgcatgtgcgtgcgtgtgtctgtgagtgagtgcatgtgtctgtgtgttgtatgtgagtatgtctttgcatatggtgtgtctgtgtgtgagtgtgttcgtatctgtgtgtaaagtgtgtttgatgaatgtgtgtatgtgtgtgatatctatgtctggatgtatggtgtgtctctttgatatatgtgtgtctgcgtggtatgtgagtgtgtgtaagtgtatgaatgtgtgtttgtggtatgtgtaactgtgtctgtgtaactgtgtctgtgtgtatctgtatgtattgtgtgtgagtttatgtgaatgtgtctgagtgtgagttgtctgtgtatgaatatgagtgaggtctgtgtgtgagcctgtgtgaggtgtctttgtgagcatgcatgagggttcaaagagctcagcctctgcagactggtaaaaccatgctccctttcctattctcagctttgtcattttaggctaattttatgagcctgtttctcacctattaaatgggagtagtttctacttcccaatattgtagggattagaaaggaggaagatgtaaaagtattgaacaaactaggagcaaacaaatgaaaatcttagaaatctgaaatatatataaatgcatatatatatgcacatatgatgtcagtacccttctcttcatagacctttcctgaagaaaggtctgtttgtttattctttcccttctgctgaccctcagctatggagaaaatgcaatgcgtgtttgttggtgacagcagatgcctattaggagcctttggagctgcagtgtatgtgtcttgataggctttgccctctgatgaatgtgttgaccttagaaaatcttccagccaaactcccagtgcatagtctagagaaacagtctttctgatggccaaggattctgcctagattttcaaacacttgtgaaatctgccatcttagccccttgtcatacatttttttcatggcttagaaattggctcttcgtcggtgtggatggtaggcttgcaatcccctgatccatatctaaatccacgtggccagagaggctgggaaacagggagtaccctaagagagacatgcatggtaccctggagaagaggaaggggacaggatatcctgagtggattgggaacatggggtgaggggagagggagctgggagaaagaggaggggagaggaggaaatggggtagcaggaaggttgagttgggagaagaatagaggagagcaggatgagagagatcataatagagggagccattatagatttgaggagagatctggcactagggagatttccatagatctataaggatgacaccaactggcaatctaagcaatagtggagaggctaccttaaatgtccttccccaataatatataatatatgccaccctagagacttcatccagtggctgatgtaagcaagaggcagacacccacagcaaaacactgaactgaactcctggaatccagttgcagagagggaggagtgatgagcaaaggggtcaagaccaggctggtgaaacccacaaaaatagttctcctgaacgagggggaactcatggaccccagactaatggctgggaggccaacatgggactgatccagaccccctgaatgtgggtgtcagtgaggaggcctcggcaatccatgggacctctggtagtagactggtatttatccctggtgtatgaatggactttgggagcccattccacgtggagggatgccctctcagcctggacacataggggagggcctaggccctacctgggatgacatgacagactttagtgatcccccatggagggtctcaccctcctggggtagtgaaggggggatgaagtaggggggggagagggaactgggattgacatgtgaagcaggcttgtttctaatttaaataaaaatattaaaaaaagaaatggctcttcactgagccgtacacctggaatccagttgtagagagggaggagtgatgagtaaaggggtcaagaccatgctggggaatcccacagaaacagctgacccaaacaagtgaaagcacagggacctcagtcataaagctggggaagcagcattggaccgaaccaagcctgctgaatgtgggtgtcagtgaggaggcctagacagtctatgggacctctgacagtggagatcatgtcatcccaggtagggcctaggccctcccctatgtgtccagtgtttatccctagtgcacaaatggactttgggagcccattccctatggagggatactctctcagcccagatgcagggaggagggctaggtcctccccaaaatgatgtgacagacttggatgatcccccatggaaggcctcaccctccctggggagtggatgggggccagatgggggtgctgttgggagggagagggaactggaattgtgggattgggtttgttatgtaaaataagattgtttctaaattaaacaaattaaaaataaaacctttaaaaagaaaaaaaaggaattggcttttcttgtaacatagttcatcaatttttataaatttaggagaggcgcttaaatcacattcagttttgagcaaccttttgtatgctttgcacctgaatagtgtgaatagggttggaagtaaagaaataaataggcgaaaaccaattacataccctatgaatataagagataagcttccatttaaaaaccagaaatgaagtgaatgtcacttccctgccttaccactgtttgttatgcacatcattccagaccctctgtgattaaacacgtacagaaatagccggctactgccgcccagccagttgggggactgtttttgctctatctaacggaaatcatgagcagcgatggaagcccacaggttcttgtctttggctgccactagaatggtggctattgccaccttcactgctgttctgctcagccaccacatctgccatctgctcttgatgttaccagttcaaaaatgggggtgggggtgggagggacagacccttgatagaaggcagtggatttagtgttgcagcacagggagatgtcttctggttgactcaaagagtgagccaaacagcctcaagcctgtggcaaagatgtccattatgggcaacccctcatgcaaatgaaggattgtgtttacaccaagactagtcctctatttgactgcctgaaggcagtcctcagtagcccaagccaggctaaaatagccactagagcttggtaaggcttgtgttgggaaagcatctgatgtgactatttgaaacaatcatcattaaaaagtagttgcattattgagctcaacttgtgtgtcagtagcaagcagctgtgttgcagtagagcctcttcaaggtgtccatgaactattcaaagcagcaaatggtctactgctcaaaacagccaagcaccagggaatggtttaacacctgtaagttacagaatcaaatcatctggggggggtccccaataacactaaagtgttgcttgtgataaaggcctatcattaacactgatagtatttaatagacaggtggtatctgtctcattattatacacttggctctgttgattgcttttatcccttgtagtacactctatctgttaaccttgtactagacaactagagcactcctctgggtatgtcctacagggcatctccaaagatgattaagtggctagaattgccttaaatgtggtgacattctgtgaactggaagcccagatggaataaagggaggaaaggagagagccctctaacacaggcatgctctgtcttcttggccatcatggtgtgaactattaggctcctccatgtccagccttgatggactgaaaactctgatgccgtgaaccaaaaataactatttgcctcccttaagttgttttgccttcagtattttgccacagcagcaaaacccctaatgcattgatgttttaaatgctcttctgattcattgtaatagttgagtgttattttcttctctgagtataccatatcataactgcccaactgtcactgtctctatgggaagttttttaaaaaaattttaacttaaactgctctgatgtacacctatacaaatttaaaatgtgaagaccacaagtagcttttggctgtcttagtttcttttctattgctgaagagacatcatgaccaaggctgcttacagaagagtttattgcaacttacagttccagatggtgaatccgtgactgccatgctagcaagtggctccatggtagggagcagcaccatggtagagagaattaggcaggcagatacagtgctggggcagtagcggagaacttacattcttatccacaattagaaggcaggaagagctaaccgtgggcttttgaaacctcaaagccagcccccagggacagacctcctccaacaagacacacctccaaatccttcctatagttccagcattgcagaccaactatgggggccattctcattcaaaccctaccatatttgccttgccaatataaaatgcctggtatgtgaacttgattctgttttgttcttaaaatattttttagtttggaatgatttatttggcagttgtgttcagagttcttttgtcactggaaaaataaaccaaatgttctctgaaaatagtctgtatttcaaatttaaaaagtctgagagaggcttcccccctccccccattaatccaaactagaaatctctctgtatcaccctgaactgcctggatctccatatgtaaaccagactggtctcagatgctcacagatccgactcacctgcctttgcctcctgaatactgggattaaaagcatgtgacattctactctacatatgctagatttatggctatcaaatgtgggcaccaagcaagaatcaatgtttgttttaaactgtaagggtattttggtgtgtgtatgtgttttaatttaatgtttttatttctctatatttctgctctttcaaagaagataattgttattctgttaggaaattgctacaccattttatcccagaatgtaagaggcatgcatatggcataatcagatgttcttgtaactatttcctgtctcagtggcatacttttccctaacttggatttaattacttgcaaattaagatccacaaagagattaagagataagatgcacaaaaactatgcagtccagattatcttttagattttgtatatgctgaagatcactgtgcatattgctgtctttacattgaaaaggccttgggctgcaaattccaagatgccaaacaaagttgaaggaaacagaggaaggaaacagatttagactaaatagacagacaggctgtaagcaaactacaatgctcttgtttaagtattttccacattaaataggtgtgtagtatgattatcttaccataagtttttaaataaatgaatttgcatccatgatggctttaatgacttgtgaattgccacataatagccagtgtggatatctgaagttaaaatctgttagagctcagatttgaattaagctcactcaaagtataatgactctgttattaattttggcctcgttttgtaaggaagattttttttttagtttaggaagccaaattaacaaaatcctggggagtgataattgggatgaatttctgatacagttataaacttttggcttgacaaatatttcctgagcatttccagccattgagttaagtgaaaaactttagtccattgaaaccttgacttcatgaagtttgtgttatagcaacagggaattgcaacagaaagaaagataatacaatagccgccagttataaatgttaggaaggaaataaacaaaggctgtgaccttgaaccacactgaaacacctgctttgggaagagtagttgaggagaaacatcattggcagaagagcaggggcataaacagacctagtcaagaacgggcttggttgtttgagcaattgaaagcaggctttgcaggctaaggcatagttagaagagcatcagatgaggttgcagtgcgcggtagacagtgactggataaaggcttgtggaacaatgaaaggaggttgaattttattctagcgcaaggaaggcattatggaattaacacgagggacaaatctaagtcaatttctatcattcttgtcacatgaagaatggtggcaggggcaaaggggaggatcccaagttagggctgctatgtttgtctagccaagacacgttggttcctaggctgagggtagcagccgggaaagaagagtgaaaggtggctttgtaggttctcgggacataaggaagggcattctgaaagggcagaagagagtctagattaactcctagcgcgctgacctggatgagatggaaatcccagagggccagcaggacagaggtatgtgagttttgtttaaggctttaagatgccttattctaataggcttgtaagggttccaaagggaagtgtctctggagcatgagctgatgactaagggaagatctagaatctagctaaaattacatgtgatgccaggcaggatggctcatgcctgtaaccttgacattggggagcttggggcaagaggatgttgagtgcaagactatccaaggaacaaatacttttttgtttgtttgtttgtttgtttttcaagacagggtttctctgtgtggctttggagcctatcctggcactcgctctgtagaccaagctggcctcgaactcacagagatccacctgcctctgcctcctgagtgctgggattaagttggggtgggtgggggagtcaggagaaagagaagaggagaagagtaggggagaggaggacaagagggaccaggaagttagagtcaggggaagaatagaggagagcaagaaaagagatatcataatagaggagtcttataggtaggtttaaagagaaatctggcactagggaaatgtccaaaaatctacaaggttgacttcaactaataatctaagcaatagtcgagaggctaccttaaaagtccttctctgataatgaaattgatgactaccttatatggtatcctagagccttcatccagtagctgatgggagcagaagcagacacccacagctaaacactgagctgaaccctggaacccagttacagagagggaaaagtgatgagcaaaagggtcaagaccaggctagagaaacccacagaaacagctgacctgaaaaagggagagctcatggaccccagactgatagctgagaaaccagacaccttgaacgaggatgtcagtttggaggtctggttaatctatggggcctttggtagtggatcagtatttatccctagtacatgaattgactttgggagcccattccacatagagggatactctctcagcctagacatgggggagatctaggccctgctccaaatgatgtgacagactgtgaagatcctccatggaaggtctcactctctgtagggagcagaaaggggatgggatgggggctggtggggtgcaggggaggagggtagggtgagggaactgggattgacatgtaaatgaagcttgtatctaattcaaattaaaaaaggaaaaagaaaaaaaaaaaaagaccatccttggtgcttaacaagtctgaggctgtcagaccaacctagtaagaacctgcttcagagagaattgcatgtgtgagtcctgccattgacaggcaggcttcatttgaaaagacatttgagtggaatgtaatacacttattttgtcaaggaggtaaaacatttgccactgaaactacaaaataataacaaaagaaactaaaggctatataaaggaatgaaaatatggcctgagttcacaggttcaaagttaatattatagccaggtgttggtggcacacacttttaatcccagcactctggaggcagaggcaggtggatctctgtgagtttgagaccagcctggtctacagagcgagttccaggacagtctccaaaccttcagagaaaccctgtctcgaaaaacaaaacaaaacaaacaaaaaaagttagtattatttagatgtccatacaatccattttatagacattataatatcctaaaaatcatttggaactacagaatacttagatatgcaaagaaatttttaaaaagtaatggaggcatcacacttcctaatttcaaagtgtattacatactatagtaatcaaagcagcatggtactgccataaaagcagtaaatatagagacccaagaaatggaattaagaggccagaaacaaacccaggtatatatatcgtcagctggtcctcaactacaatgctggaagttcacacgagggaaggggtaactcattcaacaatttgcaccagggaacctgggtgtctgtatgcaaaataacaatacttacattatacacagaaagcaactcgatgtagattaaagacttaataaaatgccagaaactatagaaatcctaatagaaagcacaagagaaaagaatcaagaaataggtcttagcaattatttactgaatatggctaaagaaaaaaaagacaggaagcagaaacaaaaataaataaaggaacaacatcaaattcagaagcttttgtgtaacaaaggaaaccatcataagcacccaaagggaacctatggcatgggggtagaatgggaggaacccttgccaaacatgcctgatatgtgatttagatctaaaatgagtatagaaatcctacaaatcaatagcaagagaaaaataacccagtttttaaaataggcaaagcatgcttgctcatgtcagttctgatgaaatgggtgacttgcatggcaagtcgtcagttagaacctgcagatttgtggctaagttcttcgttacttccaaactgtaggaattgacatggttttatagtaagattttaaagttatccctgtggttataatatgcccatgaaagaattagattaggtcaaggtagactgagtctcatggaagatatataagcaaaaatccagaaatagtttttcagttaaggatcactttgctttgaacttggaaatatatccatgcagggccataaaggtcattttctgtgcttaagaatttgaggttggggctggagagatggcttaggggttaagagagcactgattactcttccagaggtccccagttcaattctcagcaaccacatggtggctcacagccatctataatgagatctggtgccctcctctggtgtgcaggcatgcatgggggcagaatgttgtatacataataaataaataaataaatctttttaaaaaaagaaaaaagaattttagatcttaacaaaagcaataggaaggtactgcaggattccagagaaaaatgaggtacacagattagcatgatggaaatgtcaccttagcaatagctgtcccagacaggtagactaactaggggtctacaggaatcctccatgctagaaatgattcagtctctaccaagagagtagcaggaaaatgcagagaaagtttgggttaaagaatattttaaaagatggattggaaaaacattgattcatcagatggtgcattgcattttggcttgggggagactaactgggtatctgcaatagcattctccaagttgggtagaatatgactagctggaattggagcacaattgatatgtcacacctgcacaacacataggaaccgtgaaaacaactgtgactataaaggttgagctctggaaaaggtctggctgggttcaagagttatttcagagtcatctcaaatagattatggttgaacccattggtagtggggattatgcaaagggaggtagccaggcgaggggaggggagactccaagaagcctggcgtacatgaatatttgataagtaacctgaaagagaacttgccaaagagatgagaacgcttggcaagtgtttgagaaactgagggatgattgaacataaatagtccttgttgtgccctctctgaagccatagaagaagatggaaaacatatgacaagtgtccaagatgccctcactaacaaagcttgtctttaagtctcctcagacttaaacaccagtgccacaatgactgagaatgccaacccccaaaaggggggatggcaccagggtaatgttagtaaagaatgtgaggaaaggaggtttggggtaggcaaaggacagcattggctatgactaagcgaaagttggcccctcagtgcaagaagactgatcgtttaacagttcaatcaaaatttgagagcctgaatggattgtgagtaccagtacttcagagaactcagggaaatgctggatgaagaaaacaacaggcatctacttgcatacttggggttaccttgagaaagcagctttgtttttctcttctgtcagtaagtcaggggcgggggtgaagtgaagacgaagaaaatccattagcattggggattttgaccttacacataaagcgagtgagacaaggctacagcttaaaaggaggaatagcacaaagaaagctttgggagcaaggggtaaggtccccaggcaagaggtaaattctcatgtcctctggttgaagagccctctgagaagaagaggttcaagaccatggaaaaagcatgaccaagggtagaagactcagacgtgtgtgtgtgtgtgtgtgtgtgtgtgtgtgtgtgtgtgtgtgtgtgtgtgtttatgtgtgtgtgtgtgtgtgtgtgtgtgtcagttttgtgttacagtgacaaaatgacctgaactaaacaactaaaaggctcagttccagaactttcagtatgtggcccgattgttccgttgttgtggggctgggaagcataggctagagcaaagcagctgacttcatggtggccaggaaacagatagccaggaagccaaggacaagatacgcttccaagttatgctccctgggactttcttcctccaaccacacccatttcataattttcatcacctcccaataatgccattgtattacaaaaccatcaagggattcatttatccattgattagaactgagccttcaggatctaatcacctttcagtgcttggatccaccaacaggaggccaagccttcaatatctgagcccttgggagtgagggtcaccatagctaccatgcatgacagagtacacaaagctgtgagaagagaaaccatggacccaaatgaatgggcatggtacatgtggtctcagatggacagggtaggaaacaaaaggaccatcattcctctgtgaagcaggagcagggtgcagacaattgtcatgcagaagacttgagataaatggagtgttctgtggccagactagcagactgaccagctagagcactttgaaccactgcattccccacctcaacactaacattgtgatctctgacaaatcatttaggctcttaattgcccctgtgttccctgtcaccaagcaatgagctataacaatgagttattggaggaattccatgagttaattcatgtcatacttattagaatgcctggcacacaagagagtgtcatgtgtgttatggcttggaaccatcattgtggtagagctgagggtgactgcaatcttgggcaaaccaaccacctatctaggtaaatgagagtgtattgaccaggggagggtgagcttggcaaagaagagtcatgttctgctgggaagccctcagaggagagaggcactcaagatgagcacaccaggtcatggagaggctggttcaaagaacacaaacattggaggcacaggcaaggggcctctaagaacctgctagtttgtaaaggagtgagcccttgtgagtgcttacaggaagcctatgaagccagagtgccttctgtatataagccctttgccgtgattgggcagtatagcggagggagtggccaagtgacacatgataccattctgtagggagcctcacgtgttggggcctcttgtagctgagggtttgaaactgatcggtgatgggatcactgttgccctctgcttgttctccatgtgagagtagctacaactagtaatgatgctggatgcagagcaaaagctacctgctggtgacacagctgagctgtctatgttgggcactcctcacaacccagacaaagagcacaactctctttcctgctctcagatgatggaacggtggcacagatatggcgctgtctggccaggccatgcagctggggggaggggcgggggaggcagtgccatcattaaagccggcaatgtggcttcacagactgtttctatccacccagctaccataacttgcctttttggaattagctggacagagaggggattaacatgtgtagtttagggtggtgacagggtcataccggctcatggagagtgtactataaagagctccaaagaatggggtggatgcattatagaactatgaggccctcccagaccagcaaatagccggggagaatggcttgacttagcactgctggaaggtcatgtggctctgtctgtctttctacagtctattaaattcccaagtccagacttctactctgctgtaatcctagctagctctgcctctgtgggacctgacaaaacccctagcctctgttgtggaggttctgtagaaatagacccgctggcttagcctacttggagtgcccctcctccactgtcagccagattgggcggtggcaagagttaattctaagcagagggaaagaatctctcaggaatcctataaccttcaggagttagtgaagcttgaaaactttgacacttttgacttaaccccaaacttccatgccccagatagagcccagatgctgagctggttccatttcgcaccccacatggggttaccttttcatctctaactggattcagagcctttgagaagtttccagccacattccaaatctggtgttccattacatattttctactcttgagcaaagtttttagagatacactttatgtgtggtgtaggtggctgcttcccaaggccatccagtctgcaactgaccattctctcggtttggcctaccctgaaggttaggataatcattgtctcttaccagacacaccaaggtcaggccctttcctgcccctaatggctctttttaatctgctctgacatcttgtctatccttgaggctgcaaattctagacctctgtcacctctgtcacctccctcacctccagacctccttgttttgcttctttttagccttgattcttccagtcagtcactggtttattgactcattcggctccctacaagccttaagcctacagacagccaagcacatgtcaaactttctgtggaattttaatattcagtgattagtaactgatttatgatccgatggccttgattttttttggctttgatttttttattgcatttttataacattacatataagccctctgactgtgatgattgaatacttgttagaggcaaagccaagtgaaagcattaactcctaatcctgctaaagacatcctcattattactgtgcttgtgttttgacttctcttttgggtaccttgacaacagtactctttcttataatccccagtgtgccttatgtaaagggtcctggaggaagtgagtaaatgaaatgcccttctggctgagaaacagtctcttaagctatcattttgatacccttttcgcctctaactagatacttatatttgtgcatagttcagaatcattttggtgtgtcttgcctgttgtgctggttaattgtatgtcaacctgacaaactagagttgagagaacctcagttaagaatatgctcccagcagattggccattggcttgattaatgcctgatgtaggaggccctgcccattgtggatggtgctacccctaggtaggcggagctactgctacctttaggctggtggtccctggtggcacaagaaagcaagctaagcaagctagtaagcagcactcctccatggcttgtgctacagttcctgcctccaggttccttccctgcctgagttcctgccctgatttcccctagtgatggatggactatgacctggtaagagtaagatgaaataaaccttttcctccccagattgtttttggtcttgcaattttatcaccacaataaaaactctgacaagcaagcttattattagaccagagccatagaaaaacattaaaaaatttcctggttgaacattttcctcctgcatatagtttccctttccataacttgattttccatcctcccctgcaaatgatttctaaggtctttccaactcccccactgtgttctttcagacttcctgaaaggcagaggccctgatacctgctttatcagcgattctttagggtcattagccaactgtcctttatagtaatatttctgacctatgggatacctgtgttgctttggctttctcaaaagaagacaaaccaaccccacaagtactttgtagcttaaagcagaaccaagcatacaaccaagttaatatgtcttctactcataactgcatatggtttatgtcattgaacaatttctagggcatgaacatttaaaataaagggaggcacagcttatgaagattgaaagcaaagtatagagaacaaaaaattgagaacttacatcataccatcaagatttgatactttgaaattagccctttgctacatcttccaaacagtgagtaagagacagtggaagaattatatggaaagaagtccagcttttgaggtttgctgtgattatctcccggtgtgaccagaaagatcttttttaatgatattttaagttagtagagtccttttccacatgcctaatagcatggctttatatgtatttactttcctgactggtttcttcctccctctggcatgcctgccaaatatgcacaaacacattaggtctttgtgtgtttaggatttaaaaacaaggtggggaatatccggctgtgttggtgtttccatgagagacccagtgtgtgacactagtcagaaggcagcatgtgactcggagctgtttgtaccagcaactttcttctgcccgttgctcatggtgaaatggtttaaaaaaaaaaaaaaggcttatgaattcttttggcataacctttgttgggaaaatgagttacaagtggttcattttatgctgagccttttgttatcaccatttagagccgttctgtttgttcagttggtgggagccattctgtgggttgatgcatgtgttttatgattgaatacaagagcctacaatttgttttgattgatctccatttggattcaaagagagcaggtgctgtcatttggaattagttttggcagtggcttggttatataaatattagaaatacagactgaagcttcatttaaattatctttctccataagaataggagagatttatattggacattagactctggttctatttttacaacttctcatataaacatgtaacatgccatatatctggacatatgtgtgtatatgtggcttccattgtgcagaaatatagcatgcagactttctgcacttctttaagagtttatgcaaatactattttctttaaaaatctgagaagaacgtgatttcttaatataacaagagggtttacttttcctagtctgaagagtatagacatttctaactttggaaactatgtcaggggttattttcagtttggtgtggtttgggggcttatctttacatctttgagaatgaccctttgcagtttcaactctctttccccttcgcatgcttgttattgttgtttgttgccagatgcccccttgagggatgctgtgctgcttctcaaatgcagtgggagggttagggcagtacttccttcccagcgtggctgtttacacttgcacatagctgcctctcaacttgtgtcctccacaaactgcttatgttaagtttctgtgctcctcagatatggacatgggactttctgtgaccctcacagactggcctgacccagttcctcctgcaaaattccagcgcaaagtacatgccacattgtgtgtaactgtttgcatgtccctccctccctctctccctccttcccgccctccctcccagtctcccttcctcccactggtgtgatttctttgaggatgatggccccctggaatcaggctcactacctgacaggtgatactggttaatcgtttatcgaatgaatgaaagaatggatttatctttgtttttatagcgaacatgcaaggagaatgactacagtaaaaatgattagaagtgagtgacacgcacagatgaccaaaggccacacattttatctgtcttttctttttgaggaatttagaaaaggtaaatgtgcatgcagcctgaatggcatgaaaacatttaaatatggctgtcatacggaagctcagtttccataatgattaaataattcatgactcctctcactccaaataggattgaagtgaggctgcatctgaggaatatgttaacggcatcacaccagaactccttactgggtcagcagaacccaaggtagaagagaagtggatcagagccataggtcacagagggtcagcagcagaaatggacagaacacccagactgtgaagcttcattcagcattagtcctagttagcccacttcctaggtgtttaatgagctgttttgttggtgagaccaggaagggcttggacttagtatcccttacctctggtgtctgtttgttgacctacttgggtaattagccacttttcctcttcatttgaccttgcctcagactcatctatggcagattaaaaagactgaattatgtgaatctagctgggaatctggggctgtaggcttcctgctgaagtcttccaacatggcacccccaaggataatttagcatctaaaacattcagtggctgtggtgttttaaacagttcccctacgacctcagaaagtaagaatgccctctgggttaagactcactaatgtagaacatgttttacatgaaataattatgtaaactaatattgtaggccaacctttagttgtatttacaaattcaaaactgcagcctaatatgtactactcttctcgttgctttatttaaggagtagaaggtggggtgttaccacactggaaagaacattagagttgaagtcagatagctctgagtcaggtctcacctcccccacctctaacctggactgcacgcaaactgtccagagtcatagtctcactctgcctgtcacacttaagctcaatgaggccagaggtagagctcagcagcgtttggttgggatccactggagctctttcccaattcttagagtcacaaaaactaagggtcttccgccagccgctcacagtctacctttcccttgagaaccatgatccttagactccttccctcaaatccaccctcccactttcaatttcatttccatcttggtctttgtcccaacactagcatgcttgtcctcagtttttcctcactcttgatctcttctgtatcacagagaattcatccgcctagcttggtactctatgggatcagatggttttatcaggtggtccttaggagcctcagctgtagtttagcttctgcattctgccagataataggtttcctctaccctgataatgggtttttccaccgacgcagtaagccagatcaagctgaatcggaaaaaaaataaaataaaataaaagaacacgtttatttgaacaaagctactccccggtgggttctctggtcccagagatcaaggcaggagaagtcacacgtacaaactaaagcctggagcttatatagcctgtagatgaggggtgatgccacaagctgggtttatgcccaagtatggtcaaaagctgactgctttaggtggggacttgggcagctggtaacttcagttgaggaactgccatagctgccaagaatgcagaactgggcttttggtgccttttcttgcctggagattctcagagagggtggggtttggagagagaggaatggggttttctggatcaagcaggagtgagcaggaggttccaggggaacactaccttagccaaaatgctaagaaactaatacagtccatgtctctacctcatcagcagacacctctgcttttgacatctcttagcaccctctccccttgagcctctggccatgaaagcaacaatgagttcctgctggtacccatccatctctgcctgtctttaaccactacctcttgcttagcattttttttaaaagatacagtctccctctacagccctggttggcctggaactcaccatataaaccaagctggcattgaactcacaaagattctgctgcatctgcttcctaagtgctaggattaaaggcatacaccaaccacccaacccttgcttagcttttcaactcacccagcactttgatacccaattccatgcattaaattccttctgatttctctagtagcctctaataacactccttttttctctgtttttctccatttttatttaaattagacacaagattgttttacatgccaatcccagttccctctccctcccctcctcccctgtcccccacttacaccctacctatcccataccatttctgctccccagggagagtgagatcttccatgggcggggggtggaggggtgttcttcagagtctgtcatatcctttgggataaggcctaggccctcccccatgtgtctgggctgagggagtatccctctttgtgaaatgggctcccaaagtccattcctatactagggaaacgtactgatctactacaagaggccccatcgatttccgaggcctcctcactgacatccacattcatggggtctggatcagttccatgctggtttccctgtaattcctttactagttatagaggtttatatagcctccaagcctttaaggcatgctgaaaatgctggttcattactcttgctctgcatgggtagtaactagtaacttgcttttgtgtgtggcccaagaatttgagttttcaaaaattcctacaggaagcctacactgaagtaggagattcttgaggtatggatagggagcatcactaggttcttccaacctaaggcttcctttttacaaatcagccttccaacaagagtacttgccctcaggaggttaaaatgactgtatcccatccactttatgaaacagtgtactacaagtatcaaaatagcatactaaagagatggcccaactgttgaaagcctatgtggacccgattcccatccccacctccagtggctcacaaccacctgtaactctttaattaaaagtaaaaataaattctaaagcagtagcaaagctaaattgaggaatgttgagaagctgtttgcaatgttaagtgagataatgtgtgtggcatcattccatatgtcatagagactcctgaaatgaaaaatcacagtcattaggcatgatggcatacactggtaaacctagcacttggtggtctgaggcaagacaatctcttgagcttaggctggccagtgagctccagagctctacctgctagcctctgcagcactaggattagaagtatgcgccacccaccatgcctggcattttacatgggtgaggggatcaaaatccttgtgctcatacagaagtactttatcaactgagccttctccctggctcctaattatttgttctttaaggtaacagaatgcagatagtacacaccagaaacacagataaacaatcagattcacaaacaacaacagaccctctcatttcccggcttgtgccatgttaaccagctttctatctcaatatcttactatatggcagtagaagatgactgtttaatttcagaagcctttttaaaatgagttttaacttggaatcatgagtcagattgcattgcaacacatttcctaaggagattatttccctaattggctgttggattttctacattctatgcccctgcagatactatgaatataaccctgtccagttcttatcaaagtgtttattgtgaagcatgccattcacagaggactgcctggaggatatgcagtctgctcctcactgggagagtctgtattttcctcacagtttgtgtcagatcatcaaatagctgccacctgggatctctacatattagtttcttgtcagtttcactttaccagggaagatgaatgaaaaataaaagcttggtcattggggaattttgaactgtgtgttgaaaaaagaaaacacacaactttccaaatgaagaagagaagtcggtcccaaaatagactcatgaggttctaccatgaaagtgcttacctataaatgagggacaaagtagagatataagaaagggatagagagctaacagccttctattgcccaaaagatgtattcatgaggatgaagggaagatatttctacacatggaatgagttggggtgagtctatgtgctactcctggagaactactagaaatatttgcatcaaatcagaattgaaccaaaagcagcacgataggagagacaaccaaagaaaatggtaagcagcaagcctaatcaaatgtactaggtatattgtcctttgctctgacaaaatactggacagaagcaatccaaggaagggagggttggctttgcctgacagttcaaggggatacagtccataaggcagggaagccatggaggcaggaatatgggcaaatggtcactgtatccagagagccaagactgatgaatactggtgttcaccttactttctcctttcccctttgtgtttagtccaaaccccaccccataggatggtgttacacacattcaggatgcatcttcccttcacagttaaaccactccagagtctcttacaggctcttaaggtgtatcttcaagatgattctagttgacatatccagccaagttgacaataatgatcaactgtcacaatttatggccaagtctaaatgatgatgctgggactgtgagcctatctaatgtgcctgtctgtggttaaggaagagaaaagagaggttacaggttgggctctctagaagcaggtgctagaactctatgttttgggtgcatggtatttatgaagaattacctgttgtgagaattgtgctaacttcaaattcttacacacatgatctcaagtgaggatgaggttgtttggttaggctctaagcaagaatggttcaggaaataaggaaaatgtccctgtgtagacagggacacctggtgaatgtgctgtggggtgaaagaggccaagactggagtgatgaagcataagccaaagaatgcaaagatggattgccccaccaaaagttaggtagaggtgaggaacggattgacccaaagtctcagagagatcatggccctgcgagagccttggttttgaactttcagccttgaaaactgaataaaaaccaatttgtcaccttaagcctatggtactctgataaaacagcccagggaagctaaaacaagctatgagtaagcacaaggccaaactcccatgaagaaaccacagagcctgggctcactggtgaggaagagtactgccttgtcatctgaccacagaaagggctgccccaaggaggttatgactgccccaaggaggttatgacctagggtgactgactccctgcagaggctgacctagaatgtgctagctgtgagctgagatgtttactgaccctccccccacacatacacacacactgccatactggcagttgtttcttctcagaagatctgattggtaaatctttgagtatgctacagtaagccatgagaaaagtgcctgggtatcagggacttatatagtcattttgtttttactggaaaaagtatcattggggatataactcagtggtagagtgttcatccagtatggtaaatgtattaggttttatccccagcattgcaataccaaaagaaagcttttaaaaaatgatttaaagtagagagataactaagagcaagtatatatgaaagttttaaattaccaggaagaaaaaaggaattgaattgtaaacttgataaatccagcaaaggaatgagaaacaatgcagtaacaagtataattaatcataaggacatatgttggaagcaagccaaaatataattttcacaacagatgttttttatctcttataaaatggcaaattcatatttaaaaacatagaagtacattttaagctatttataagaaatactagtaaaaacaaactgtagagttggtgggagcagactgaatctggtgttttggttatttggtgtatggtaaaatttagaatagcaaacttggggacgtagctcagtggtagagtgcttacctagcatgcatcaggccagaggtttgatccccagcagaaaggggacactggggagaaagcaagcccttccatttaaccaggtatgtatggagatgcttatgtataatcccagcacctgggaggctgagaaacaggaggatcgtgaatgcaaggacagtctgagctgtatagcaagatcctgtctcatttactactgcgtagctagccctgcattcaatcctcagtgccactgatttcccaactgttcccttttttcttcaagctacttcccaatctccttcataacaagatttgaatccaacacccttgaactggtagaagtagcttcaatctgatgcattcaaaaagaactggtggcttcaaaaaagacatcatgtagaatgccttccgttttattgttagtacctttgcttttcctgttaataattcctccttgggctagagaggtagcttggcagcagagcacttgtttagcatattcaaggatctgtattcaatccctagtactggcaaaaatatttcttctctttggggtttaaaacttagataaaatcatttgtttttttcttttctttttctttctttctttctttcttttttttttttttaagaaaaatgtacatagcattcctcaacaggttaatgatatccccattaagtgtttgtttttgttttaatggtatgtcaggcagtccagactggcctccactttggtatgtgtgacataccaaggaggccctgggatcttcgagccacctgagtggtagacacaaggagggtcatgagatgggtgtttcctgactcagacacaagggccagcttcatcatcacaccatcaccatggctgactcagcctcgctggctttggtggctgctaaaactgaatcctcaataagccttcttttaagataaatgggaaaaaaaaatcactgggaatgtgggtctggtgatgaagttacagcttctttggctttggccaggtaaagctaagttgtgagaaactccctttggccgctttggaaaatcaagataaatactcagatatccataaaattcattattggaacctaggctgaaacattagcaaatagcatgagatttaattgttcttaagtgggtatgaccaatcctgtttttcctaaatctgggtgaatagagattggggatatgctattgctttatggaattgcatacaactgttcatgaccgagttaatatgctaattacgaactggagtaagtttgggtttcaggataaaataagaactgtaaattctaaagagtatacatcaaaagctctcattttacttttaaatatatttaggaattattctgttgaaaaattcaatttaagagttttccttgagggaactaggaaaaatagaatgccagtagttgacagtaattgctattgtatacctatttgtctttatcagttcccatgtagttattgagaatctgaactgagatcttttttaatcttcaaaattttcatttcatgccatcaaatatatatatcatatatatttgatcaaatatcatatatatataatcagaatgtgggggagagaagctgaacacaagcctagttttaagtaaaaataattttagttgaatttcctccttgaaaaagcagggtcttaaagtcatacaatgataaaaataatttaacaagccaggcagtggtggtgcatgcctttaattttagcactaggaaggcagaggcaggcagatctgagtttatggccagcctgttctacagacctagctccaggacacccagggttagacaaagaaaccctgtcttgaaaacaaaaaacaaaagtaaataaataaatgagcaagtagcttgtttttagtttcagaaactgtatacggttaccagactctaatctcatgttaataagtctataaaactgagtcttttgttgtaatttttctttttcatatgtttaggttttttttgcaaatagtttaagggacttttccaatcctaattttattgtatttatttattttctctgactttctgtgcactgtgtctgtgtaggagcccttggaggccaggagagggcattggaagtggagttacagtgtcacatgggtactgggaactgaacctgggtcctctgcaagatcattaaatgctcttaaccactgagccatctctttagcatcctaattttatttcttacaatgcaggtatgcatttaattgatgctttggggagagggagttaatagaaaattaaaatagctcttccttaaaaaatatagtgaatggaaatatccatagaacaattaaaaggaattccaataataaacaggctgtgtacaatatttgagtctgtgtacatacccagaacatcagaaatgagggaatagatgtttgtcagagtgcaaatggtttgaaataattcattaacagtttaatgggaaatatggctatagaatttaagatctaagtaaaatggatgtttttctcacaaattgccaattactaaaattttatactgaaatgttcttgaattttatgaaatgtagcattagtaccaaaacctgataacaaagcatccagtgtcacccttcagtgtatacttttttttaaaagatcttgtgtggtgcacaactgcagtgagttcatgactaagttgatgatgtcatgtccaggaaacacagttttcactaattcctcctcaacctctgtctcttatgatctctctgccccctctttcatggtattccatgagcttttggggtgggtgagtcaatatagatattccatttaggatgtccacagtcatttaatttctaatgtacagttatttttaaacaggaagattcatatatatacacatatatatatgcatgcaatatatatatatatatatcagtactgctaagagcaaatagaagtgtgtgtgtgcgtgcgcacgcacatgtgcacatgtgtgcacatatgttcaaacaacaagcatagagaagagttgtttacagcagtgcaacaaattgttaatgttgattatctctaatcaacattataattagtataattagtataagacctaatttatttttacattatacctgtctatggtttaaaagttgaatatgatcacaaggcatgatggcttgtgcctgtaattcctgatactcaggaagctgacgtaggaatattgcaaattcaagaatacctgggaaacttagcaagatcttgcctgggtatacaataaaaaggtacggggttatagttccatggtaaagtgcttgcctgggttcaatctccagagctgatgtctcttctatgctaaatataattatagccaaaaagtttgtggaagtattatttggagtataacatctaagcaactctgataaaaatcagtcgattatcatataactactgctggaagactattcacatgttaagaaaagaatcctgtatgaaaactagtagggcaatatccaagccagcctctgttggttgagttactgcttttatctgttggagactctgtatctagaagccagtagtgttgtccttcactgtggcaagtagggacttcgaagttaaattggagactacagtttatttaaaatatatccggtcctgtggtttatcctcttgtcaccctctttattcactcctttatgtgaaccccttcctaaagttttactactcaaccctagagccacacctgctcctttgggggaagaggaagtgaggctatctcttaatattgaccaatgatctcttttttaacaggaacctggggggacaaaagcagtgtcaacaatgaataggccgcccgtcgctaccaactacagatgacttgccattttatttacaaaggtaaggaaatgtattctatatccctcttcctgacagatgctctatacagcacttagtttttctgctgtatctgtatttgcctacctagttcatgacattcaattttgaccatatcaaattccaaacaaacatcaaacaaacaggacacagaaacttttgaatgtgtgtctgtatgtggagggacaaagcatgcaggggaggaaaatgccatgaattatgatgcatggctgacttttaatcaccttagaattctccttaattttaaacaaatactctacagcaaaatattaaaaaggatgctgacttcatttacaaccctctttaggtagcttaccagtgcttctcagactatcttccctcctttcttttatagaaataggatgattataatgttgtcatctatgcttatcttggcttacacacttgtaagtacatattgtacccagtgcagaaacataacaagcctaagtaagggcaaagtgtaaccccactatcccagtttaatagtcctttgtagtttgctgctgtgacccttagtgttgtcatcttgggaggtctggtatctccagggagactgatcttggttgagtctactgaagtgggaagactggccaccgtgggtgagagtttttgtgttccccgagcactggttctggactgtataaaagagagtgagtagagaacaggcaaggaaatcattgttttctctgcttgccagagacataatgtgagtagctgctttgggttcctgggctttgatttccccagtgataaactgaaataagaccgttctctcttaagtggctttggtcatagtgttctatcacagcaacagggagagaagacaataacaactttgaactcagttgaccctttaggggtgatgaaggggggatatcagtgaatattgatcagcgatttcatttctaacactaccctggggcagaagaagcactgtcaacagtgaataggacacccatcactaccatgaccctcccttatctgttttgtgcttctcagaagaaatttaaatgaattgagtaaactggcatagtttccaccccctcttccctactgtcaagtcaggactgattcacaaagtaaagaaatatactttgagactacctgctcactgcccttcattcatgtcaattagtccatttcccagagggttgtttctcaactccctgcagagtggctgttgaagtgtttccattttcaaagcctagggtctgagaagtgcagctgctcacatggcatgcttcaaggaggtccttctactctttgctctaggttgcctttttatcctgagctggtattgctaagtctttcaagcattttaatcttcctagcgttttattcaaaacccatcaaagtactattctaggaaaaaaattcagttcttctttaaacaaataaagcagacattctgtgaaacagaattagactccccgttctaatacagacaggttgaatggagtccctctgagaataaaaagagtaagagggaggttgattgtgtgagcaatacacctagtgaggtgagttcatccaagtccataccttcattctcctgaatggccttagtcatgttggacacccgccatcaggggtgaactcagttatttagctcaggtgtagagacatggctggctaattctttgatgccacaaacactgaacttattaaaatcccaggattcaaaggcttgtagggaagtcagatctgtctctccctggggtattaaatgcccttcatgtaatttaagatcctgaagtatttttggagccaatggtaattagcaaagagttccaaactggacagtgagcagagagtaagagactttggagcattcaacccttgatgctatgtcttcatcaaacctctcccttcaaggctcagggatctaaatgacaaaaagaggcagaaagattgtaagagccaagaagacagcatcttccagactcaacaggactggaacacatctgaactcacagagactctgagagcacacatgagacccccattggttcaaaccagacagaatccacactgagagagggagtagacacagagtcacacccctaatcaagaaactatttgcagttgattcctgctaggaaagtgaatatcagttttctccaatggagtttcacagagtatgtcaaccacactccagagcaggtcccaagcctaggagtagttgaccaacaaaaagcttacttcatgtttgttttgatattctttttttaatttgcttgttttttttaataatgttgttttttgtccttttctttgagagggatagacatgaagtgagtagggaggtaagaaagatttgggaagagttaggggaggggaaagaatatgaccaaaatataatatatgaaaattttttaataatttaggaaagatcctgaagtattgtggctccctgatgatgtaggtacccttaattatcacagaagtaactggctctaattttttaatggatttgaagtcaaatatgaacgcctattaaaaagtgattaaaatacatgtttaaatatctaatgtctatcagttagaaaaatgttttatcttaaatgcattagaaaaaactcacaggtaatagttttgcatatgtcaaaatttaaaacagactaaaaggcccataccagcatggaaaaattctaataaagtgtttagtaataaaataatagtcccataacttagaattgaaaatgaaattactaatactactagcaattataggtttaaaaaccaatgattaaaatactaaaatactaaagaccctaatagatagaatagcaaaagtatggactttaatcttcactagtaattttcaaaaatgaaaattaaaatgaggagagagcccttatttgacccatcaaattatcaaagatatctaaactagagtagtcattattgctcgataaggcaagctcccactcactacagatagggctgccggtgaatatagacttcttggaaggcaatttactagaatattagtaagagcgttaaagtgttaatactctggtatggcttagtcattcttggaattgaatccaagataacattgatattggacaaagacataaataagcacagataattactgtattatttgcagaagcaaacattttgagccacctcaactatctagcaatattagcattattaactaaagtactgatatacaattggattcacacagtgatgtcttattgtatctaaaagaaaatattcttctcccagggaggatttttttatcataaaaaaagacacatgctttttatatcagtgttcactgaaaacaccaagatggatactatcatttttcatatcaaaaagcatatgtcaaaaggaagagacaactgtgctaaaatgtgaatcatggagctgcttacgggaaatagtattaagagtggagttctgtgtgtgttctgattcataattttggtactttccagatatttttttacagtgagctcttacaacctgaagccaaaagattttaaatagcttttaacaagaaatctatcgacacgaaaagggtttaggcttcttcagacttacacagttaagtatacttgcaataagtacccttggattttcttttttctgtttactttgtttgtctttctttgaaacaatggcagtaatgacaacaaaaaatatgtaaaatatatttttctttaatagcattattatgttgtattgaaagagtagcattcagatttcaaatggaaatatttctcctttgtagatgtcgtcaactgctgaaaatggagacacagtacctggcaaacaaaacgaagaaaaaacctacaaaaaagtgagtgttttactgtcttcagaaagtaggagcagtcttctactgtttgccaggttgatgttggtaggcctttcttcctccattgtctgccatcttactttctcttgctgttccactgaattagcaaaaccttggtggcttaaatgatatagttctaaatgtcagatgtctgacggggtgtgactggtgtccattgagccgaattccttacagaattggtgggggacaatttgagtccttgttctatccagttactagatgttgcccatgtacccagtatctcaaggtcaagaggagtctttattgggctgtgtccttctaatactatgaaggaccagtgaattgcaccatgccctctcagataatgcaaaataatttctttatttcaaacttagttgatcaacaatcttaatgttcattagcctaaactcttcattggcacatagcaaggcatatttatagggtccaaggattagggcgtgcctatctttgagggacatctttctgcacaccccagttgccatgtgaacatatctggggagacagttatttttctgcctctcttattattcataggaagaagactctcagtagcatgtgatattctatgtctagcatatgagtcctctgactcactgccaaatactaagtacagtctgtctttaaattaggggggtgggggaaaggtgtaagtgtgaattgctggcactccctgaagtttttaaatcttctacgatctcgtgtctatttcccacagacctttttttctaggcttccaagtatatcttaccagtctttgaatttgataaaattcttgactcttatcaataattagcaccattgtacccaactgtaggttaaccttacacgttacagcttttaaaagtacctgccctcctgttccctgggattgggaggtttgtgcagtggagacttactatatctctttttttgttgttgttgtttctctttgatattctttgatggacaactggtgtgtgttgtgatgtgaacatttctcaagatgtctgctttgactgtgtttttaggtcatgtgtctgtgtgaaacattggtttcctaagtactcttttactgtaaatcttttgaactcttcttttctactcagagaagcctagacatatgaacatggacattgccatctaaagtgatggtgtggtgagggaaaagatgcttcagggtgaagactaaagaattccagatgtcaggtcttagaaaccttctgtatccagccaatgatactcataccagttctcaactttagacatggctggaacatcagttgtttcttctttccctagtaagcatggtaacagtttagagtcacttaagtcaccagactgtcattactttaggtcagcatcaggcagtatcctcagtcagcatcaaagtacaccaaggatctggactgaaatcctttgtcatacaaacataataaaaagaacatgatcacaagtgtgccctggtcaaaatacagcaatgctgggaagattctacaattaatggatattttgagtcagcaatattgagaaagtcctaaaattgtaaagctcaagtgctataataattcctatagatagaaagagacaaaagaagattaagaagacctgtgtgtacactcacatgcacttgcagatacaccaagaaccttttaagaaacacaatagtataggaatcttttgatgatctaattagtaaaaggaatcttcttaaaaggaattactctagctgtgaggatgttcagagttaatgaatgttgacttgaaggggggaggggaaactagtttggtttttttccaacaatatggagaagtgtggattaaatactgcacagattgttggtacctggttgggtaagtagtcccaaagaatgacaaatttgcttcactcccttcttctccatcaggacagtgcgtgagttgcccctgtagcttcatattatacccatgatcatcatgaaaacataaaagtaatattttgtaagcatacagaaatattggaaatggtgctcacccccagcatcatgctaccttgcatttcaatacatgtgtcttcaagtttctttccttgttctggagctctgatgatgcagtatgaatctgtttagtaaagagccttggtgagccattgtttctcagggctgaaaataacccaggttaaggacatctcccttccccatgagctgccaggaacaagaaagaccccagaggagtctatgactgggagaaggaagatgtgaaaaacacctgtagggctcagtagcctctaatgaggagccgctgtggactattcttaaccagtggtcttgtgctttcagtacggggcaccagatttgactggcagcagccagcaacatgcagcttcatcagtgtaaagatttccacgtgttttagggaacagtcagtgttggtgaactccatgctctaccactgccttgatcatttgcacgtgattgttgagtcagctgcttttggttcttccaattgctcatttctctaatctattatcaattcttggcaagcccaggaggaactaagcataaacccataaggttaatgccttcaactaagggctaaaacaaatcgggttttagctgtgtaaaacaaacatgttgcccattaaggcaggcattaatggccgcctctctgtgtttacagagtctaggatttccactctcggttaatttgctgaatgtcttccgctggagttgtaaacacaaaagcctacagcagccaggcaggaaacaggttttgctataactatgggaactatcgtaaggatgaatgccttcctttgggagtgggtggcagtcagctgctgctgcccgagctgtgcatgaatgtacaccccagcctgtcatatactccggtttttgggtttttttttattttttttaggatcttgatgtaaagtctcccaagtttttaatcgtcaactaattcagacgtttgtttgtaagttcactccgggcaaaacaacatgccagtgtagtggaacctttctcacctacagacagcagcctgtttgcaaactctgacacattcttactctaagaaaatgaaagagggaagaaaagcatgcaaaagaaatgttttcaagaatttgtcactgcttcccaatatggttcagtttatttgggagaaaaatatagtcccatatttaaaaaaaaattagataatgacccaaaccagtattaagtgtcaagacaagcatcgggcattttgtttgtcacaagtccccaggagctggaagatcattgctgtctcccaagttctccgaagcttctacgctcggagagcattttactggggtaaaaatttcttaatgtcaccagcatggtgattcatgcctttagttagtcccagcactctagaggcaaagtcaggcagatctgtgtttgaagccagcctggtctacaaagcaagttccaggacagccaaggctacacagagaaactgtctcaaaaaacaaaaaaaacaaaacaaaacaaaacaaaaaaccctaatgtctcttctccttctgtcactcctttagtgtctgtgccttctaattttcttacttgtctatatgatggggcatttgatgagcatgacacacacttggatgagggtggcttgctagaaggatgtgtgtgtgtgtgtgtgtgtgtatgtgtttgtgtgcacatgcatgcctgtgtgtgtgtgtgtgtgtgcacatgcacacacgtgcatatgtgtgagcacacacacccacaacatagacatcccatttagggttgagcaatgagccatcatttattctcagtgctttagcaagtcatgagtctctgcattattactgcccactgtaaaaagaagcttctcgttgtgacgcacgcctttaatcccagcactcgggaggcagaggcaggtggatctctgtgagttggaggccagcctggtctacagagtgagtgctaggaaaggctccaaagctacacagagaaaccctgtctcaaaaaaccaaaaagaagaagaagaagaagaagaagaagaagaagaagaagaagaagaagaagaagaagaagaagaagaagaagcagctgcttctctagccagggttgagggcagcactaaatgtatgcatataaacagaaatacttagaaggcagtttgacaacttgttcatttatcataacaatagcagaggttcccttgggggcttatgatcttcttttgacaacatttactgtgcagcaggccccaaatccaagcaaaacatggtttgttatccccataagaactattgaatcactgggcacatcttgcctggcaggtcagtttgtagcaagcagagtccaccaatgggtaaagccattggtgacttgatgacttttacacactagctggctaagggactccatttttagtctttgttagtaagcttgaagcttaaacaggtatgtgctgattactataatggatggtgcagttgtaggcactaatgctttagtgtgtacagctggtagtgatggctgtacacacctaccagcggtatagggtgcatgacgtcagaggactgtggcaccattgacttttctattcaaggaaatgagagttggccacaagttaacagaggaaacgatgattgaggcaaatttctgagaaagtttgctcatgtagtcaagaccagcctcagattcacaatcctcctgcctctggctcttcagtgctgagatttcaggtgaacttgaccatcctcatcaagacaagcaattttggaaaagcatcgaaatgaagacttgtttgtgactggagtgactatcagaattttcctgctacaagtagagggtattgtcttgtttgtgggacttatgtccagataagagacttagaagcaagcaggagtcaaggcatgcatctgtaggggtggtcaacacttgagtgaggagatgctgatgctagagatccaagcttctgcattttttgtatggattttgaactcactaggtagaccaggctgagcttgaattcacagagatctgcctgactctgcctccagttgttggaattaaggatatgtgccaccatacctggcctctgtgtttttctataaagatgtatgtgtgtgtaccacgtgcatgcctgatacatgcaaaggacagaaaagtatgtttaatcccctggaactggagtgataggcagttgtgacccacccattgtgggtgctaagaaccaaacccagttcttctgcaaaagcagcaagtggctcttaatcattgatccatttctcctgctcccaagccccttgaattttcaatgtcatgaaattgcttagtcctatccctcggaaaacaacagatgtcgggatggctgagtaatatgtcccagatcacctggcagttctttgctggggagatggctactcttggctgattttttgtgatcccaaagttggaattgatagagtttcccagccactggggcacctgctgttataggaagtgtttgttgtttgcctttctgcctccatcacttcacctctgtaccttgtctttcccacctacttctttctaggcctgtccacagcacccttcctcccctaggagagccagttctggggactacaggctacagtgggaatgagggggaggggcggcagatgtctgctgcttttgataccaatgagtctctaaccaatttccaccatgtctggtaggaaactgagagaccaggacacacatgcatagaggccttgaccgaagtgcccctgtttctttcatcttctaatctatttttcaagaccttagaagtttcactgcaaagcatcagccagtttcctgttggtggagcaggcagtgatgaggtagtggtgcctggcccttaccacgtttacaaggccagatggcttttattacttttaaagtatgagtaaggtaatggcccagagacactttgatctaaatcgaagcacttgtttcaacctaagctcctttatgtagtctttgtgaagacatacagctgcctctggagaactccggagtggggatctcaaattgaatgaaacatatctgtgtatatctgttcatgcatacttaggttggaatcatatgcatatattacctattcaaaaattgactaagtccttttcatcatttgggtagggaaaagagctggcctgtgtctcatgtcctgatcactctttctttcccttgattctagaaagccaaccccacctccctaaaacctgcaaacgtataccctgtcctgtcctcttcagcttagcctagatatctgtgtgaatgtattgagcagcagttgccatgaacagcaactcccagtctctaggaagaggaaccctgtgacattttgaacagctttcatgtttcaccataatctgaaaactgcctcccacttctcaaacagaaattgtcttacatggagagcatttaaggtctgaagacatttttttttgttctcacagcttgagaaatggtgctgtaaactatgtggagataggggccaaggacgctgtgtcttagaaggcacagaacaggcctgtcacagggttgtctaaatgtcactagtaccaagactgaaagtccttggcctaatcaaattcggtctttgaagaggagggagaatgtgagttcttctcttcggatgccagtctataatcttgtgcttttttttttttttttttacattgatctgtgtcttcattttcctcatttataaactttaatggatacatgccctggctatctcacagtgctataagtttcaaaggatttaacagatgtgaacacacctggataaagtaggatgctaatgagtagagtcccagtatttcttaatgagagtaagatctctccacctgagattctccacattcgtctgtaggaacagcaggatggtcatgtgactgacacctctcgactagactcatagaaatgatttattagcatctggaggtcagcctcagttgacctggacatggcagagggaatggggcgtgttgaagctggatactgtccttccccaatgcagtggcttatgacataagaagcaaagatgataagcttctaatagtgggctgccactgggattttaaatttgagccacaaggaggtgtggagtataattaaacaaccacatcagatttacaagcatgtataatgataaaccattatctccttctccacatagtacatgccgaactccagacatctcagcttctgtaatacatgttttcaaagattcctttattactttctgaaagatgtcacttatcattgagaaaataaatcagcagcttcagagagagcccccagggaagcaaaccatcttgtcagtctctttctccaaatgggttattggaaggtggtcacgttctgcatttgcgttggaggaaaccctggagtggtcaggtatgccccatctgtacccttcaacctcaaaaggtctatcttttcatccccaattcctgtaaacattacactggtgtccctaaaactctccctataggagctgccattctaagctcataacctgtaataggccaacaaccactgcaatgcagttgtttgatactaggatagaacagggtgggggggtgtttctgtttgtgcttccagcccccattggagctgttgttcctgctcacagtgaataatgctacctttgttttctaacctaaagactgactataaggtgctaagctgcatgcctcctacacagcatggccaggggttctcatctgaccagaagtcatccttatcctaagggcccatgacttgtccattttatcatgacctcccaagctttgtctgtttccttgcagattttttttaaagaagtcacatatgagaaatatcaaatgatagaattctggagtttgaaaaaataaaaccagtaacataagttttagttgtatacatacttaataaatactcataggattctcaccagagtattttacttagagttttacagttgtgtggagtgttggctattggataatttttatggagttccatttagtttatgatatttaaaatcctatttatttgatgaatgaaagcatattataaacaatttcaaaaaccaagctaatgagaatactaacattaaatgtttactatatgcctgatacaattctaagtagttaagaactattcattttatctttgtaagaatccagtgagggcatcaatgagacggttcagtaggataagtcacttgccaccaagtctgggacatacaaggtgaagaaaagaactgactcctgaaagttccttttggctgccacatatgcactgtggcatatgtacacatacacacacacacacacacacacacacacacacacacacacacacacactttaaaagaaccccatgaggagatgcgcctggttctctgttttcatgagttacaaatccatggactcaactgtaagcatgagttttctgtctcactcaaccaaccatggactgaaaacatttagggtgaactatttcatttgtattgaaaatgtacacatacttccctcttgtcattgttccctaaatagcacagtgcagcagtaattggcatagcatttacaaggtatggtatgttttcactaatgtggaaatgatttagagtatacaaaagcatggatgctgaatacaggcgatagtcaaatttagcactgttctataagggacttgacagtgtctatagatttgcatttccatggtggggggctggaaccagttctcctccatgaaaggagacaactgttctgttattctcattttaaagatgagaaaaatttgtatggagaggttgaataacttgtttcccaagcatagtaagtggcagactaggatggatgtccaaccctgactgtattcagagtctgccacactcccttcactaaggtctggacactgtgtccagagagtggtgctgccaatgatgttaggatggccattctcagcctcaggtgatggtgcacatcttaatagctcacctgggaagccaaggcaggaggaaagcaagttccagactaacatggtccttagagtgagactctgtctcacaggaggaggtgggggggggttatgtatagtcattctgaattatccactgtagtacaaaaccagtgacacaaataaacctggcaatttgggaatgagaaaaagacattaacattatactaaaacattttccctgcttcaatgatccaaagccaatttttctactccaaagtcttaccttaatacagaatccaagctctagcatggaagacaccttctctagacaatagtaattttccaataattttgaaatgagaaatgaatatattttcaggatattggctgaatgctgaagagaaaagattaaataaggtgactgattcaagatgttttcttgagggtggagctcaggattgacatcgaggagcgaaatctacttgacagatgagaaatattttgaatgagaaaattaggaggaaaccaccttggaaaacctagtcagctgagagtaaggtagattctcaggggcaatgcttcactgttgatctgcttggagcaaacaagtggatagagaaagcactgggcaggtgtgtgactgcccaaatgctcccctgggggaatcaagttctcccaaatgaacgcctacattctctgatgagtacagcccaccatctgttggtcctgagtcagtgactcttatgctagaaaagggaagggtgcctgcttagtcctctgtggggaagtgatgatctttgagacattcagcacatcatcaagaagggaagggaagggctgggtatcgtggcacacaccttgaattcccacactcagagagaggcaggtggatctgtgagtttaaggccatcctagtctacatagtgagttccataatggccagggctatatactgagaccctgtctctcaaagaagaagggggtgggacagagaaaggaagggagagaggaagaaagggaggaaggaaggaaggaaggaaggaaggaaggaaggaaggaagggaaggaaggaaggaaagaaggaaggaaggaaggaaggcaatgtgtagggagccgtccctgcattctccattacaagatggcgcctgcatccggcaggcaccgaatgtaaacaagattattgcgcaggcgctgggtaattttccattccttgatctctgcctattccgtggcgtcatatggcctgatgagctgcagccaatcatagggtgacacgtcccaggcggcggctgccagcctttattaggggacgggattcttggctcagggtctccgctctgggaagcttatgctctccactctcaagatgcattaaagcttgtctgcagaaggatccgagtgtcccgtgtatgatttcttgctggcgagaaatacagagcgcgcgggacatagctttaatgcatcttgagaggagagcataagcttcccagagcggagaccctgagccaagaatcccgtcccctaataaaggctggcagccgccgcctgggacgtgtcaccctatgattggctgcagctcatcaggccatatgacgccacggaataggcagagatcaaggaatggaaaattacccagcgcctgcgcaataatcttgtttacattcggtgcctgccggatgcaggcgccatcttgtaatggagaatgcagggacggctccctacatatccccctttttttattaattaatgaaaaggctttatattattacaagcaaataggtcacccatatgttgagggatagaggtagaggttgtaccttcccaaaatcaaacattaagactgtgtacgggagtcgccatcaggctgttagcttgacccgaagcgctctcgacctgtcctctgccgtttttctgggaaagggagactagggcaggcaacccttatgcaggacaacatgcctcccagagaagcctgcatattgtgtaactctctgtgcgatgccttgctcgacatccctcatgggctgctcaagccaggcattctaccctgtgcaatgagcctaggctccgggtgtgcaagagctgtctggccagcggcctattgcttccttgttccaaagctacaagcgcttgggcgataaccaccttgtctctcttagtttgagccctgagcctacagaccagccagagaagcaacatcaatccgcagcaaacggctgcaccaaacaatcctacctccacccatttccttaaaataggagacagctgaagctatctatgatgacaatctctccgtcaaggacaggagttaatctggataatagcggctctcaactcccggggagagggtggagttctgacttttgaaggtccgaagaggctcttcgggttgagtctttctgggatccacaggggattttcttcatcctgtggaaaaacacatatagctcccctggatcttatgagaataggatccgggcctctccaaagaccagttaagatatctttccattttaccatctcctctgaggtatgacgcttggccgctgtatggccctgagcgtcggtgtttagaaaattaagggtaaagagtgccatggatattgcaactcttggcaccgagggtaaggatgctcccattccctccttttgtttgattaaataagacttaagtgtgcgatgggcacgttccacaatgccttgtataaggtaggccagttagatgggtaatttccatctgtctgcagaagtgctggaacttttgagaggtataagccggcccattatctgtttttaagaagcatacaggtggctaggtaaagtcttatttctgtaatacagctgaacttccttaaacagtagcttaacttctttctgaggcagggttttttttgtgactttggagcctgtcctggaatttgatctgccggaccaggcaggccttgaactcataaagatccatctgtctcttactcccgagtgctgggattaaaggcgtatgccgccaacgcccaaaacttaaaggcgtgtgtcaccaacaccctgagcttaaaggtgtgtgctaccaacataatagattagcatcttttacaaaacaagaactttacattgtcaggctttgcttaaaaattctaaattgaagctctttaagtataaacattaataaaatcaaacatttgaaaaactggttttaaaaagaaatttaaattcccttaaggtctttctgtaatatatagaagcattaacattttaaatcttaactgaaaaacttgtttctaagatggtacctctgatttccatgcggtaacctttagttaagatggcggtctaagtatcctttttttaactttagcaaaatggctaccgtcagtcatgtgaccagctacaaaatggccgtaccaggaaatagaacattttaaaacaagcatacataaattacttgagcaactttaggatatgaggcttttcccaggcatcccaggcctccaagtagtgttgaataacatgtacggccttttcccctatcaaagactgggaaagccatctgtaattttctctgctcctctgatggtaaaaaggagtcggtaccaaatttttgttgtaactcatataatgggggtgctgatggaagtacacccgctggattaacaggtctcttaaatttaccggggtgtgaccggttatcccctattttctctccctccatttttgtttctttttcacctagctgagctgtttcctctaaaactttatctcttgagcttttagagtcatcagagctatcaagatttaaagctttaaacttatttacagaatcatctaacaaattatttactcccttgtcagtagacattccaggaggtccttttttcttatttattgctgtttctcttaacaaattattcactcccttgtcactagacatcccgggaggtccttttttcttatattttattgttaggcgcgccccatctctcaccacattcggtttctgatatgtaattctggacttctttaagattgctacaacagtgagaaaagtcaaaatagctcctagtaaaagcatagaagcctctatattaacctcccacaatagcaacattcccaagccaaagtccagaaaaatcatacctctccgaatttaccaccctgcagttctgaatccgcctcgttagaggggtctccgaggtgctggaaatgttcacatgttcccgggtttcggcaccatatgtcccgcgcccgctctgtattcctcgccagcaagaaatcatacacgggacactcggatccttctgcagacaagctttaatgcatcttgagaggagagcataagcttcccagagcggagaccctgagccaagaatcccgtcccctaataaaggctggcagccgccgcctgggacgtgtcaccctatgattggctgcagctcatcaggccatatgacgccacggaataggcagagatcaaggaatggaaaattacccagcgcctgcgcaataatcttgtttacattcggtgcctgccggatgcaggcgccatcttgtaatggagaatgcagggacggctccctacagcaatggaaggaaaagagaaaaatgtctctctgtggagacctgaaaattcctcatttatcctttgtggggggtggacttcaacatttgagtactctcagtcacccccagacacaatgtaagttccattcaaggaaaatgttggaacttaggtagggtgttgtcaccttgtgctgatctcaccccctttctgccccatgcccagccgtccatgacttctgctcatccaggaagcccagctgcctgcctgtggagcaggaacacttgctcattgagcagagaattgaaatataaatggtctgggtaatctcctaatttccctgaggtatgttttcatagtgtgaccttgtcattttctgtgggtgtggtttgggcctggaatataagatgcatttggttaatcagttgacaaatatttatttagcttggctcagtgctaggccttaaaggtaaaacagaggccaagaaagccagagtcaccaccctaaataatgttgtcattgtcttgttaagagataggctattttaataattatggagatctgatgaaaatactggaggtcaggagtgctgctgttgaggcaaggcattcaggaaacttctctaaggagttgacatgggggctgcggtcacaaatatgaacatgaagcagctgagagaagagtgaaagaaagagcactcttgtccaagagaatgtcatttgccaagccctggaggcaggaagcaactgggtggcttccaggaaccaagaagaagccagtgagcaagtgagatgggcaagctaggtaaagagcagcagttcccagctagagccagttttgtatgcatggggtcagcagacagagctgtcacaactagcagctgatgaatcccagggtttctgggacatattgaagtacacagaacaacccttcagggcactggccccaaatgtcaaccgagctacattaagaataggtagtggcctagactaaaacaatagactggggtgaagggtggattttgacttgggtatgggccgaggaagtgatagaaataattgatgatcccatgattctagctcgagttcttggattgtatcactggtagagatggagcaggatgtctagggacggtgtcatcttccaacttaaacatgttagttgggtaatgccaatgaggccttggagagaagaaccaagagtttgaaaatgtggattgggaacccacaggacaggtatggagttcagcttcaattcatgaaattgtaggtctacaggaatttgtgcaacacgacaaagagaggctttgttgcctggcagtggtggtatatgcttttaatcccagcatttgattaatcccagcactcggaggcaggggcaggtggatctctgtgagtttggggctagcctggtctacagagctagttccaggacagtcagggctacacacagaaaccctgtctctaaaaagagggtggggggggctttttctgatattacatctcagaaccctctctactgaggtatgtagactaagcatccttaagtgtttcaaaccccaaaactttaaaaaatatttttattaattctttgagaatttcatacatgcatacagtacattttgctaacattcactaccaagtacacaactttttcagtgtctacataacaccacaagcggaaaactccacacctgacctatgtaacaggttataatcaatacataggcacagtaaacatatggtataaaattaccttcaacagatgagtttcatgttttaacttcagtctcatacctataataatatctcatcatatatgcaaatattctacagtacaacgatgaagttatactattgctacttcataactgtaactttgcaactgttatgaatcacaatgaaatatttaatatgtaggatctctgatatgcgacccatgtgaaagggtcttttggccccaaagggtcataacccacaggttgggagccattgtcctacaatcttccattggccttttgctgaccactaaaaatatccatggtccatagcatatgagtcttatatgctccatccctggggcagtgtcatgatctgtctccagtcaattgtgcgtaatcatagagagcgaggtccctggccaacagcttggcatccacagggtccgcacaacagttggtatataaggtttaagagatgtatcatttttcttcttaaccctaaaattgtcgtagactttctgtgggcaatttgttccgaagtcttcaatttgggatcttcagctagagttgagatatgtggtacaccaggtggtggcggtacatgcctttaatctgggggaggcagagacaggtggatctatgtgcgtttgaggccagcctgtctatagagttaattccaggacaggctccaaaactacagagaaaccctgtctcaaaaaataaacaaacaaacaaaaaatcgctgagatatgtggtacagatggtcagacagggtagagtttatactttgtgtgattgaattatgacacgtatactttgaaagggttcaatttcaggccattgagatgtcacaacaggtagaggagcttgctgtccccagaacctacagtggtgggagagtactaaccctgaaagtggtcctctgacttccacatacatgctgttgcactcatggatgctcacagacttgtatacacacccgcacacatgcacacaataagaataacacagttttttaaaaaataaagaggtatgggtggtttccctggctttgtctgagtcaactgcagtggtgatttgggtcatctctctctgaggtcacttcgtggaatttgaaagttgatattggtgatgtgtcatccctaagtctctttgactgtggtccatggactactaacccttataagagaatttagcaatcaatgcctaactccatcgcttaaggttccattcgttctagatgttgtcccaagcaaaagctgctctttgatagtttccagtcaatatttggaattagccagcagcccaattctccagtccagcagcttgatagacatcttcgtcaaaaaggaacaaggtcagtgactgtccagatttgctgtttgaaaagtgagaaggaacaataagattgtttgaaaagcaagtataggctcccaaaagcatgggaaagggtagaatgcaaaactgttgtttgtactatagctgattcaatgatgacagtgggcagagcacctacccttgtgctcactcttcagtgtataacgccttggtaccccaggagctcaatcttgtgcaggatacttaacatgagtatagcaaaactgtggtatgtcttgagtactaaatctaagaagaggcactgaatggatgaaaaaaataaccctaaattactattgctcttattggactcctccacttgtgccccagtggactttaaatcccagggaagcagaaactgttaggtattgattaagtgtgaattcagtacttcaataaggcacacatatgactgtcaccctcttcatcctagtccccttctcaaagtttggaattctgtagtgtaaggtcctgtttttcatttgtggctgtctgtattcttgagtatgaaggggatgggttattttcaaaaagcatttgaagactgttaagtgtttcatgcattaatgacatctcaaatttaaaaagccacatccagagaggggcagtgttctttgacttctttcacattcagaaggaaagaattgggtgtcaagagccctttcttctcctccatctctgtgtcacggggtccacctgctcttctggtgacaatggaatcctcatgacaaagcagatgccattctttctaaggactggatgagagggtctatggttaaaacagcaaaaatgggggcggttggggggcaggcaatgtccagctttgcatgcatcttaaagaaaatcatgaaagaagtaagtcagcagggcacatagcaaatcctaacttccaggttacgtgcctatttttagcttgttaattattgaaacagagacaggtgagatctactatctcccagtagcatatatggaacctaagatcaggcttatcttcaggtttcagatacaaaaagaggtctgaagcagtgaagttgaactagagagcaaaatcaaaatgtgaagtctcctgagagtcaacctcgtaaaaagaaacctttttttttcccaggaagtattccatgtaataaaaatgtcaaaagtttccatttccttttggaatttagggcatgccaactcaggctgcattgatgtttatctccgtgctttttactcatccatttttttctaaacaagtatttttttagcctatcactgttttttgttttttttttaatgtaggcttttttggattgtgtgtgtcttgtattgcttcacatgtgttcacagatgtgtgggaagaaagggtatgccaccacaggtccctactcaactcgacaaggacggggtctcttccaagagattagtggtcacacaaagcagaacagcatgtgacatcccttggctctcagagcccttgccagggaagcacactagctagttcataaggctggccctagccacatctgggcttggcaggcctaaccctccagcctgaggttccatttctacccaggaagagtgtaagccaaggctttccccacaaacaagagcaattaaaggcatccacacccttcctgctctcacctaagtttagcatcagcatttatgtgagttttcctggagagatgtgaacacatttctattcaacccaaatgaggcaccaacaatcggccagagaaacaagtctacctaagactggtttagtgaaccagtgagttttggagagttaactacagaatacagtgatgtggacgtgtaagccaagtaaaccaagttggttttggccatggtgtttcatcaccataatcgaaatcctgcctgggacagacactaattcacaaaagcggcatctctacagctcagtgcacaacttgagagaatgtccgattcagagggagtggagccacaacagcaccagatcccaagatcactgggcaccttggtggcccagaacattgccagttttctagccacacctctaaccccacattctcattcagtagatatggccaggcacctatttgcattaagcagggaaagagaatttgatgttttttcaaataatttgcattgccttccatgtattgttttaagaatttcttaggaatacttttgctgttttattgctaattttacttacaagttaagaacactaacaataatttttgttacaaatattttcctgacctaaaattaaacttataattttaactgttacctgtttttaagttaaaaatgttattttattttcagctagtggaaaaattatacctatttgtggttgaagaatgatgttttttgtgtgtcagcactgtgtgataatcaaatgaggatatttagcacacccgttgtattatatattatcattcactgtggtgaaaacaccctggatcttctcttctagccattttcggtaatggtgcagcattgttacccacagtcacccctctgtactggggacccacaccttactccttttaactgtgacttcttacacacagaccagtcactttctccccatcattcctttgcttttcccagcaaagttttcataaagtcagacttactgctacttcccaaggctcagtttccacttttatttttcaactttatttctagtaatgccttgtttaaattataatagtttacaagacatacttctcatagtattgcttaattttcaagtttttcctgggtggtccccaccagccacctgagttctgcccatcgagttagggcccaattagtacacagagacttctattatgtacaaatgctgcttggtcaatgactaggattctcatcgattagcttagtcttaattatcataaatctatatattttataagacttatcttatccgacgccttccatcggcgtccccccttgtcagtggatcacatcgagctgctggaagaagagcacagaggaaaaagggcctacttcctgtttgtccttccttaaatgagtctccctgctatgtcacttcctgcctggatcaccacttcttactacatttcccagaatactcttagactcctagtcccaactaacttgctgcctcattggccaaacagtactttattcaacaatcaataagatgaacatacacagaagtacattccctatcagggaaacaggtgaatagtgggggggggggggaggctgcatttcgttcctcattttcttccaaaataatatgacttacattcctctcctttagcacatttcctacccttccttaaataccctatggattagaaactcatagtatttcaaaaaaattgctcctctggggtggggggggaggatgatctccctcaccttgttctgtctgtggtctaggaaaatgaacacaaaagaatttctaaagcatgtcatggccatttcaatactgttggaaaacagtgtgggtaaggtatgatgtgaggcagcccaccagatctcttcaagcctaggtggatcctgacataaccagtgaaaatatggggtccagccttgctcatctgtggtctacagagctcctagagaccatctttgaccctgaaggccaaatgtctactattccatgtgaaaaattcatcaccaattcatctgttcattaaatgaactaatgtccatttgtgccatctcttgggtccttatgcaaaccagtctccttaattgtagcccaatgcaaattaccagtcacttttgagactagtgggacaatgagtgaaaagggaggggctgcctcacatagacaggacctggagatattgagtgttttaaaagtaatataggtattgtctttatttaaaacaacacaaacttacaattttatagttctatgggacaggcctccaacacttagctcagtgacttaaatcaaggtgttggtatgactttcttccttcttggacacaagggggaaaaatgctctcctatctaagtctttcttttcccagattctttatgccacttacattccttgctcgtggcctcttcaccttcttcacagctaactgttgactgctttcttgcattatgtattattctgctctttggcctctttcctttttcacttgcaaggacatgttattacattagaatcactcaggtaacccaggacagtctctctatgtaaggtgagctgtatagaaacatagttacaaatgcattttgcctcttcaggtaacacattcacttgctctataaattaagacatgagcatccttgggagctattgttcttcatgcctcagtgtagactggcagcctatgtctgtgtgtatctatagtgctttgttgtcttgtaatgacatttctatcagtttgcctggagctctttacagattgcctgacgtccgagatggaaccagtccatccctgcatttccttctcttattttattctctcttctgtttaactccctccactgaatcactgagctcagtaactacaacccctgtgcctaaatctcccagccatgatcttttcacccactacacacatgaaactagacttctgtgacactcccagagattaaaaaagaaatgtggccagtgtaactgctattagaataaagcaattaatatttgaattttcagtcaaatgtagagcctggtgctgtagatggtctggtctctttcgttgcctggttcagcttgcctctccctcagtaccgtttgctgtgttattcctttgtatttacagaagcagggcatgtttatgaggcatgtccggaagaaggaaatgatatatggaaagtatctacatagggtatagagacagctgattccctcagctggagtcaggggttataaatataccagtgacttcgtatgtgccatgggactggtattttccatctttcaacacacttttaataagcttagatgaatttactttttgaaaatagaacattagttatccacagagattttatcctctctccctgtctccttcctcccttcctccctccctctctctcctctctctctctctctctctctctctctctctctctctctctctctctctctctctctctctctctgttacacacacacacacacacacacacaggaataaggtctttacctccaataacagaatcaatccttttccttggaagtaatttgacattcactgtggtttttgcagtctgctgagttgagaatagtcaccatcgtttgaggtagaaatagaggaaatgattaatttagaaaggagaaggattgtggggtgggtggaagtgacattttctgcattgtattcttagaaacttagactttctgaattgtatatgtctctgataaaactgttggttaacataagaggaaacagaagctaaagaaactttcagtccctaggacaattttgtgctaagtacaaaaacccaagctggagtcaagttcacgtctctggatatcagcctttctcagccctcccacttagctcaacaccttcattagctttcgagaccagagcctcagctccaaagatggcctgcatggctgttcctactccaggcttgcttagttagcaaaaggaactgtgtgtagtttatctgttgtagaacccagcaccctctgtatgtgcctgtgcctatggaagggtggtgggtgagcacacagagttacccacacactacagagcacttcaaggaccagaatcaggactaaagtgatgggacctgcgctcggggacttgctgtcacttcagtgtttgtgtttctcccatggctttgtgcaacaaaacatgaattaagacaactgtgcagttttaaaacgctgttctcaatgagcctgtgacacaggacattcctttggttcagggaacaggacagcaggcatgctgatagtggaacaagcattcacatgacatgttcattcagatagaatgacttatctgatgtatgccttgcaagttttacagttagatgaagagatggttctcaacaggggcacttagcagtgtctacagatacgtcagggtgtcacaccatgggaagaaggatgactggcatagagcagatagaggccacacagggcagtcccctagagcataaaagtatctggtccaacttgtcatttgagccaaggtggagagaccctgacctgcaggaattttttgacttgcctaattcttggctttagaaggttatgcagagaactgattcatttagaaacaggccggcctaagcatatttggtctggaacagtctgtgaagagctctgtaatctaacagggtgaggggacatgggtgctaggagctcacttggagaatggcagccaaggaaagcagccactgaattacctggcctccctcccaggtctctgttctcagttatcagagtggaaaggccatttctctttgtcctatccatctgtggattcaaggatttaggcatactgttttcctgttgctgttgtttgagggaggggagggtgtcctgaaatagtttagataaccggattggaagagttaattgtgaatataccggacaaaaggacactgtgccattatccagtctttacacaaacagctgcaggcagagagcgtgtgccaggtgaaggattgggtctcagcaaatgccaccatcaccgaggacaccgaagaaggacaggaaggctcaggaggacaagtgggttgggagaatgccctaagcctccctcttgctctgagctctgctcaaggacaggtgtcctgagaaagatttgcatttccttgttcctttataaatctttgaaagaaaatttccatattgtttggggttccctgcccccaacaccaggtggttaccttccatacagattgaatcgctgaataaagatgcaagcctttccaattatgcttcttgtttagggctccagcaacaatggtgaccacacccctcccacttgtgagcccagcagctatggtgctgacctgcctcacagcctgagacattaatgattggcaggcgtcaaggctgcttgcgttcacttctgttcacaaactaatgcattctctcaaaagcccattcatttactcaactggatggcagaactttctcccaagccatataccaaatcaggtgtgttaagttcacaagcctgcctgttgctaagcaaccctcttggtagacttctagagcctgtgtcagatgctagtgctggagtaaagatgaaaggattctgcccaggcaaagagtctgtccaacaaggactagaagaaggcaagatagaggcatggtacatggggcagggtaagctattagagaggtgcagagtgcacagaacagcagctaccatgggggcagggagctatgagcaggccttctgtacaacagactcatgtaagagaatgtatgataggaatcttcaggctgttaatttcttgtttgtgtgcatgctaagtccttactgttatggggtctgcacaagggagaagccatacagtagggctatttatccgtagcctatagaatccgagtgttgagatgatctttttccatccatcaactactaagtctcatacttaaataaagcacatttgtggctgaagagccatatagatcactttgccctgttcaaaatggagtggttttctgggatgattgtgtgtatccttggattctaataaaatggctggttgtgttcagaagtattctctttaagtggttgtactcagagactgagttgagctctgaacaaaggctgtggttagatggcagaggggtgagcacagttggacagagcacagggtccctacagaaacattccagttaactgttcctcagaaagggggaaagcagccatgctggactaagcagataatcatggaccggacacttctatttgtgcaattataacaggccatgcatctacaggggccaccaggggtcctcttagatgggccactggagaagggtttgtggggatcaagttgagagggtctacaaacctctcagagtagtccccaccatcagagtaatgatcagctccatggaagaatcctaaatagtttattgttagctcagacatctgtgatctcagacaacaccaaaaactgttcttttggagttcagggaggactctggcaccctgtagctggtaatgctgaaggttgcaggcaggtgaagcaagggaaaaagtacctaatctgttctcctttctcgatatcagtctgacttggaaagttgtaacccaaagaaggcacagcacatttgctttctgttgtactctccttgagtaactatgactgaagagtgtctactggtgtgaccatgactggagagaaaatacaagacacataaaaaaaatggtggaatgaaaaatgttaaaccatatgaaacaagtggcttttggttgatgaccataaatactgaaaacaataaaatcagatagtagaatttcaacattttgtatgtataagaaacctttacagtcattagtcgactgccttcattttatagaggaaggaaaaaaactacaggatgtcaggaccctttctcagcatcacagctccctgatggtggaagaggctggaagtccagattttgctgtgtgttgctgagcccatcagatcagtttgtcctacttgcaaattactacagtgaggcttacaaaatcaagacagtagtcattgaatgctttgtgttctcttctacccttggactctaagctaacttgtggaagagcctgggactctgctcccacatccctggtgtcacatgggtgtctcgctgcattctgatacagctcctcagacaaagtcctcaaatgcttcccttgcaaaagagtccatcatctcctctggacatagaacactctaattcaggaagctatgagggacaggaacctacaggggctaaggggagagccaactgactgggtgtgaagaggccaataacaagtgagaaaggcctggagattgtcatggttgttttgtccaaatggccaaataaataaataaaaggttttagaaactattccatggccctaaaagagaagtgaagtaggggaaattgtgtcttgattacaggttgagcctagatgttggagggagcatagagattgcatggacaaaggctacttcacctaggttttcaagagtgccctctatttgaagttaccacccaatttgggtactataaccttgttgtggagttctggaaagatgtgtgaatggattttcacctatcaatctatgtgctattttttttaacaatcttttttattttacatactaataccagttttccttcccttccctcctcccgctcctcccccaccttcccaccccccatctactctttagagagggggagatatcccatggggagtcaacaaaacatcacatcacttgaggcaggaccaaggccctcccctccctgtatgtaggatgagcaaggtaaccctccataggtaatgggctccaaaaagccagttcatgcactaaggatagatcctggttccactacctgcccaagccacacaactgtcacccacattcagagggcctagttcggtcctacgaaggttccccctgctgtcagtctagagtcagtgagctcctactagctcaggtcagctgtttctgtgggctaccccatcatggtcttgacccctttgctcatattattgtaccttcctctctttgactggactctgggagcttggcccagtacttagctgtggatctctgcctctacttccatcagttactggatgaaggttctatgatgacaattaaggtagtcatcaatctgattacaggggaaggtcagttcaggcaccctctccactactgcttagagtcttagctggggtcatccttgtggattcctggcaatttccctagtgccaggtttctcactaaccccataatggccccctctatatctctttcatggctttccctctctgtacttctcccaactccaccctctatctcccccacctccgtgctcccaacttactcaggagatactgcctatttccccttcccagggagaccatgtatgtctctcttaggatccaccttgtttcctagcttcactggggttatagactgcaggctggttatcctttgctttatgtctgttatctgtttatgagtgagtacataccgtgtttgtctttctgagtctggcttacctcactcaggatggttttttctagttccatccatttgcttgtaaatttcaagatgtcattggttttttaccaccgagtagtttcagccactttggaaatcagtatgactatttctcggaaaattgggaatcaatctacctcaagacccagcaatactactcttggacatagacccaaagaacacattctcataccacaaggacattgctcaattatgttcgtggccacattatttggaatagccaaatcctggaaacgacctagatgcccctcaaccaaagataaagaaaatgtggtacatttacacaatgtgtgctatttctttaacttttctttttatttttatgtgtgtatgggtggagtggggaggtgggttcccgtagagttcagaaaagggcattgggtcccctgcagcaggagttacaggcagttgtgagtcatctgacttgggtgctggggaccaaactccagtccagcctgtgagcttttcagattccactcaatagcctttctgtgaaaagtaatcaaggatttatctttcagacatgcaatctttctgtacttcactttcaccctctgtggtggtaagaaagttgaagataaatattacaaacaactcaaccttcttatgatgagcactttcagtaatttaaaggaatagtatattaatatgtaagtacagaaaaatctcagaaaaattatcacattcaagcctactaaatatttaaaaccagtcttctctgggaatacctgagttccaaatcttaaagcctcatccgataaaaccaacactggtgtttcatatctctgtgtttaatattctcagcattgtttttctgtagcttctcaggatgggccagaactattaggcagttagtaacagttctgttgaagtgctaaacagttgctagaataatcacttcaaataatctaaggataaagggcaggtgtttttcttccaattttttttaaaagagcttgctcattgagatttagagaaaacatattattactttttagggtgtttctgcctcattagcagtcatagcccttcccttctcaactttggctttatattgcataattactctttattcccataaatatataatatattcataatatatcatatacttagatatattaaggtatgtatttcttctcattcaagagtttatcatgaaaagtaactggtagagatttgaaagcaaagacaaagctgttcttattgcttctagccctgcctctccactgttattaatttcctctccatatctaatttttcatagatcaagaagcttagttgttgacaagtgatgaatacaaattgagacacaaatagggaaaataaaatataattcctgcttctctaaagtggttcactcctgcttttgttcgctctatggataaatggtggtaggaatctcctgctttgtaatttatcttctgaattaaggagttgcaaacatgtgcccatggccttgttggtactctgagaagaaccatgttatccttctacttagctgaacaaatcagttggtggggtggggaagttctgaggtctctcgggttagacaatcaaggtatatgcaatgaaagtttacagattactgatgtgcccagaagtaatgtctttttcctccattttctctgcaagtcttacccccttaagagtggtaattgtcctggcttagcccctgaaatccaatatccctctcctcctccctctcttcttctctcttttccctggacccccttgtgagggaagatgtatttgtctgcatgtatgtgtatctctgcatgtgtgcaaatctctctctctctctctctctctctctctctctctctctctctctgtgtgtgtgtgtggggggggggtgtcatatgcagcaagagagggaaggcatgaaagaagcataaggcagggttaggggtaagaatcctctcaaggtaggaggggacaatataattccagaaaagatggatgaaaaagtagacgttgcatagggtttcttctcaaaaagagcagttggtctttacccctatcccacatagagctagttagcagcccaaattctaattaactttctaaagaccccaaactgccaccattacattggtggtcttcttgggcctcttagtgcccaggtctctgtgtacctgacctcaagagtgttttgtgacaatagaactctgtggcagtgaggcttggctttggccctcacctgcctacatacatgtggaaaaaagagttaaccaagagtgatgaaaataagaagagtaactggctgcattgtctggagacagagccattcagccaccaacagcatgaagagtagccagaggactgagctgggcctgtgctcccttgaaatgtaaaactgacagtgctgacgcattccatggccagtgacaatgtggggtaatgtggtctgcatgtgaacttggggagaaaagacctggcttccagggctagcttttccatgtctgtggtatgtggctcaagataaactgctttgggtttcagtttcatcataggtaagtcaaaaaaataaaaactgagtggagtgtgtgggttactgtgagcaatcacaagggccattgtgccagaagaacactgaagggctcgtatgctccgcccaccccaccacaaacacgaaggttataaaatgaggttatgacacgaaaaccaccacaataatgaaaaggtctggctaaagacacaagattgttgcttactacctggaaacccatctgaaagggctttgctaacccatgagatgaggctattaagtaacaggtagacagacacttagaccgcatctatatatcgatcactccagccaggagtgttctgcacactcgtctcatccacgtcaggattttgtgttcctgccaaagagggccccctgcctaactgagcccattgtggaatgcattctttatgtattatataaaacattaattgtgtgaggataaatgaagttctcctaatggactatttcaaacacaaaagactaaagaattataaattttattataggaataaagaactttacattgtggatgcaaaagaatagctatagtctttatccttggacaatttacagtttccacaataaaacctcctaatagaaagcatagaatcttttccagagcttccagggggagtattttgcaagtgcagtttagctttaattagcctgaggtaattgagtatggttattagtgtgtgaccataaaaaatgaaattttgaagttatcagcaaatatgtaataagaacatagtagtgattaagaaagtgggggttaaaatagcaagtttgaaaaaattaacattgatggtgctggcattggtaagaatattacaataagaacattctcatactctaattgggaagagtgtaagttgaagaatctcttctagaaagatctcggcagatgcttgcaaaagtacgaatgtatatatcctttaacccggcaattcttcttggtgtctacgctgcaagttactcaataaataagttcaggaataggtgaccaaataccattatagtattttagttaatatactattacctaaacgtgaagggtgagctagttgaatggggtagcttgtgcttgcaatcctagctccttgggaggctgagtcaggagaaccacaagctcaaagccagtctggacaatgtaacacactcctgtctcaacagtaaaagctgggatgtagcttaggggtagagcacttgattagtacgcacaagtctctgggtttaatccccatgggagggaggaggcatattttattaggaaggaaaagcatattaagcaaccactcctcgttaactgaaaatactgcactcttaaggtattcacaactcagcagtggagaattatgcatattcaattgcccttaaggagatatgccaacaagtgcaaatgaaactcttgatagcatggtattatgttttctactttattggtcttttagaaatgttacagtttaagctaaagacactcatcataaacatgacatcggaggaaggaagggagagaatgtgtatgattacaagaaccataatctatcactgggagagcaattgaaccaattgtgctgcctacaagctgtgagactctatgtaaccaccaacagtaatgtactggttaggttggcaattctgtgacaaaaatatctatcagaagtaatgtaagggaagaaaggtttgttttgtctttatcagtttcagactcacggtctatcatggtacagaaaacagcagaggcactcagtgcatgtagcaggagcatgcagtggtggctttttccatttcctaaaggttctataatatcactggctgggagccaagtgcttaaagccgaagcctatgaggaactttccagattcaaagcatggcatataaagcctgtatagttggacagagaaagaaccaaggtgcaacaaaacctaaatgtaggggtctcactttttattaatttactttttgtggtgtcatggctgggtacgtgatgaacatgtgcttaacacggagctataccctcatctccaatatacacatgtatgtgtgtgttttcatgtatagagaggaaaagccttgggtacatactaacagtttagtatagttaaccctagcatgcaaggaggggaaatgggtacatttgtgttttaccttctgtaatgaaggactacttaacttttccctcaatgagcatgggttacaatctgatgatttgcttatttttaagttacacaatgcagccaggcattggtggcacaatcctttaatcccagcactcgggaggcagatacaggcggatctctgtgtgtttgaggccagtctggtctccagagtgccaggataggctccaaagctacacagagaaaccctgtctcaaaaaaaaaaaaaagttaggcaatgcagtctattatacatttgtttctcagcttaagaacattttgaatcaagtttaggttcataagttatagcacttggaacataggttcaattatgtgtaaaacaaaaagtgcaattgatgatggttgaagccatgctcctccctatttctcttctcagtaacagagcagcagtccttgcctctacagagtcattggggacccccaagctcaagtcattgctcttccattcttaatgcacagcctccaaacatgttcaagaaaggctgcctcatctgacgtcacctcaatacagtccacactctttcctctttagggcacaatctggcacctgggcatctcttctcacatatcatcaccagaaatcaagttatattactacacctaccttcaagaaaaccaggcaaaatgcccaattcaaatttcaattactgtgtaacagggtttctcagtattggctttggggtaattctttgtttaggagccattagagctcccataagatgttgaacacacccctgacctctaactaacagttggtaactctctccagctgaaaccaccaaaatcatctccatatccttccaggtgtcacctggggaaggcacagtcacccttcattaacaacagctgctaaataagaatagctgctgagggcaagtagcaacatctgtgagaagcattgtgacatcgcccccaccctaagtagagattagtacttctgtaatgtttggactttaaagctgacagctcccttttcaggaaacgtaacattctaagattttgtgggatctaattttagttggttttataaggttgaaggaaactcaatctttattctttttttgctattgaatctaaattttgtgtttgtgtcaaataaatactgtttctatttgactacatgaacaagtaaaaatttcccccagtgtgtaggagtgatattaagaatatattatgccatatttatgatgaatgtcttcagtttaaactaacatttgtgcaagactaatatagtagcattcataatgccacactgtcttaaatcatgagtttcatttgcaattgttggcctatctccttaagggcaattgagtgtgcctaattcaccactgcagagttacaaatacctcaagagtacagcatttttccattaatgaggagtgtttgtgtaacaggcttttgcttgccgtgaagtccgcctctctgacgggcctgtcggggaagtggaactgacttaaatgaaaccgtcaacattttttcttttttctacctttttatcaacattcgagaagcagatcttccatcaaacactggaatcttgataaaaagcttcttggtgaaaaaggaaaattaaatagaaattgtgtttgccttgggcttcttccagggttgtttcatgcccagtgtgtcagggtgacatatcccaaggcatctcctccacacagaacgcagcccagaaagaggcctcattaaaacagggctacaatattcttattttgaaaaatatagattgtagatggagtacttaattggtctaaataataaaaacccagagtcaggtatagaggaaaatgctgagtgatcagagagaagaagcaagtgaaagccagctttacctcattagcctcccagcggtaaagagattgagttcctgtttcttcccacttaatatcctctctctgcccagccatctcacttcctgtctgtctgtacagacctccagacctctatggttagctagtggcaagctccatcctctgatcttcagacaagctttatttgtacaagcaagatatcaccacagtagatggctgcaaaaaaaaaaaaaaaaaaaaatgtatcagtaaagtagttgcctgtcatcaaagtaatagagccacaccagtgtcatgtatagagctaatgatggcaaatggaatttgtcatttctgcctattgtcacgaacagagacagtgtcgaggggccagtgggagaacaggatcccagggtgatggtggagtattaaaaagcaagtggagaaagagaaaaatagaaagctggctttctgaggaagtggagaccaaggaacacagagcaattgtcagtgatttagtttgtcctccattgattgtcaatgatttaatttgtcctctattgattgtgtagacacaggaggatctccggcctgcaaccagtacaacaaactgtctaaagtttgtacctcctctttcaaagtgcagatggagcttagaatcatttgcaaaaaaaaaaaaaaaaaatactatccaggtgagaggtgatgtatttcttcccctaaatatgagaaggtagcagccatttacagggagtcattactaatcccttgagagcacccagcaagaagcaatgcatatatctggcaagactttggagcatcttacagctgagctcctcacaaaggaccttccctatcttcttcctcctcctccttccagcatccagcagaaaagggaagaagagcccctcccctccctctattagatgcctatgggtgcagctagagaagggatggagaccactgcaagcaaacccaaatctgtctttattaatctagataaagcatatcaaatgtccatgtgaagctattttttatggctctgtgccgagatatgaacagggacactgttgttctgagtcaaaagatagacaggtcctagagctgctgtgaatttcttctgagcaaaggtggatcccaccccagaatgcatttagaaaaacatcgggagacacagtgagtcattgtgatgacatttcctaacaatctagtggttacatgggtttatagtatcgtaaaccttaaatacagacctaccccacagtacagagataatgtccattcaggtacctttatttcctttcattatcctgtttgtgtgcacacacacatgcttgtggggtttgtatctccaaatttccttgggtttgctgtacacgctactgctcaaacataatataacattttatttctccacattatagaagtttttttattgtgctgatggtttaattacatccagtcactttctcaaatattcttaattcagattgaggtttctgtgtgaatccctgacttgaataaaaacaagtaatttagctcagggttcttgatgttccctcattgatgtgtggaatgaaagaacctccaccgtggtcccccttccttcaaaatcctctctctgttctactaaagccacctttccttaagcttcatcccactaccctcagtgttgctaatttgggggcccttctgctccctattttttcattacctcctcctgccccttgattttcagtaccacctatgtaatgaatctttggccaataccaggccaaacttctgctctgagatcctaacctgcttatcatctcaaacagaactcatcatcttttcccaaaatacattccttttcactctgccctccccagatcaggaaaagcaacatcacttcttggaactgataaagaaaagtgtcctcatttctagctcacagaaagccctgtctgtctgtctgtctgtctgtctgtctgtctgtctgtctgtctgtctttgtctgtctgtcttcaaaatctatctcacattcgattcttccatccaccttgttcatcagcattctctacaccactaccatctccatatgaaccaagcaagggcctcctaatcacttgccctcctaccatccctccaatctattctcctcacaatatccagtgatcctttcaaattagacaccacctccccacataaaatccttcactagtttttgccatctattgaccaacacaactgaaaaccatcagacctttagaatgccttcaagagaccagttctacatctgcctagtctttccagtccccaatgccaactctctacctgttgcccacattggtttgcttccaggtctctataatttgcttcatctaatcctaaaaatgagcttccctaacccactaatgggaccttttcctactatatgaaagcccataatgtcattttgttaagtacaaccatatttaggccacttccatatccctgagttgtagagaattgcccaacagtggtaaacacaatgccagccttcagtgacataacctgctaactgccccatgccggctagagttgaactatagaagtgagagagaatagtagaaatctgcctgccccaacatagattaccatgttgacacaaaggggtgctatataactactttcttggactggtaagataagagaccttgtcaataaacatacctgatttagagttagactctctaagtatcttactcgatgacatcctgggctgtgccatctttttcatatttcatgaagatatcaagaagcagaatggaggggattggattaaaagatggcttccagagtcaagctgtgtgaggttttgacttgatcctagagtgaggacgctgaggatccattcagaattttcaagtaaagtaataacatgatcacatttgtacttttgaagcaaatctctctagcaacatatatccaagctgtaatcccataattagttcagatagccttagggggaaactgctgtggacatcaaatgttccaatacttcctttaaagtccatgacatcagatggcatattaagtgatccaatttcacagacaatagtttgtaggaggcagtttcctgttaccaatgtaaggtcattaaacccttgctgtagttgggatcattgttttccttctggtgggtctctgtagacatttcttcttactgttaagatgctcttcattatttcatttttcaacttcttcccagcatctgtcagcaccatcttcaacagaaaaaaagacatatgtaaagcaaatgtgtaaactcaggcttgataaatgatcagaacactgaactgggaaccttctaaagattggggactcattcctcgctgtagaatgtagttctagccagttaattcctagcaagttaattcctagatccaggttagctgtgcagtgggcattttgcatccctagccatctgacagctctgatgatcagatgcagtcattgtaagataatgctttgaccatgtagtccaacagtagagctcttgcctaacatgagcaaggcactgtgttcagtccccaggactgctacaaatagagccctaaaacttcaattcatcacattaatgcaagtcaatatccactttccttagtattagcatcatacctggacaagctatggagataaataagtggtttgcctttgtgctgttttgtggctctctctttccctaagtatcacatgcttagtatccaggcaacatattgcctccacttatccctatgatgtccagacttaaaaatagattgtgttgctgttccaaatctaagcctgtattaagcctctactaaaggagccaaaggcttcccccctggagttagaagggggaatggtcgtgttccagcacttgagggatacagcatgcagagcctgcctgcggtggaaacctaagaacaagaatgcttgcaagttgttagctcactgcagtcttgctggtatcccaaagaaaggaagggagccctagggcttctgaattgtggggagaatttgactgattgtaggagagcagcctccaacacttcatactgaatgctctttgacatcatcacgactcgctgatctgataatcatgcacacaccaggcaggattttaaagtgacttcagttttagagcatatatatatattgttggatttaaaaccaggcctcatgctcaatgtgaaagtggcaaatgataggacctttgctgctggtggcctatgaacaattatgtgtcactgaacacaagcaagaatttccatgaagcaggtggggtgctacgtaattatacctaaatgtactcatgctgaagcatttaatttttacccagagattgggaagaggaagcacgaggggtcatgtctactgaggcagccagatacggcctcatattaataactcctcatgttaccagtgatgctaatgatgtggtttgctgagagctttgtgagcttttgtttggcttgcctatggctgggtgtgattagcagctaattaaacattcttatctcggtttatccaaaggaatggctccttcggggctccttcttttttggaagtcaaacaggcagacttaatagagaactttcaactttgattcttgactctttgaaaaagatgtggaagccacctgcacctggtggtcagactctgccagatgccagcagaaagacttgggaccatcacctaaccatcctaagccataagtgtacatctataaagggaatcattgtcaccaagcccagctacttggttaagtgaattaaggaactctgctattagagaccacagagcatggttgttttggattcagccgcccttggcttaagtcctagctccccctctttaccttggaggaagttactaaacatacctgagtccatgaaatggagatggtaatgcaggatggaaatcctttacccagaatccttgggacatgttttgaataaaagatttgggtgcatttgcatatgcctaatgagatagcttgtggatagaagccaagactgaacacaagatttatttcaatgttatgagtgccctccacgattagcctaaatataacttcatacagtatttctaagcatcttatgcaggtaatggactccctttgactccagcaaatgaataactgctgtgctggtgtgctctatgttttgttttggtcatgacccatcattgggtatggtattttccattcatggcaattgtcagtaaccagaaactttgagaagctcaccctatcactggaacacattattgatagttcccaatggtggagcatttgggatttcaaattttcacattggggctgcttaccaactagtacttacctctccaagttactgggaggtttaaagaatcaacaaaagtcaagggcagtgggagccttgtaagcattgtggaagtatgcactgtggttacgttgggaaaattatcattatccatattgtcagttgtctggcataaatgagttgctcaaaaataattgtttctattactttattgctatgctattatttctcccactcaagtacttgtttttaagaggtctgaaaagaaattaatgggattacgatatgttgtgggtgttttttttttttcccggtctttttcttatttaattaaacatgtcagtggggtcctcattccttcaggagctcaaaacttgatctcataccacaagagaaaggttgttttcagtatttcctagagcgaggggtcattgttttaccctgatcctggggtccttcttcatatattctagggaagtgacccactgtccatgtcagcagcatctccagtgacactcacaccccctgaagtctgagggttctggtcaaggttacagactgctggcagctgagactgccttctgttcccagggtggggacagcaaggaacatggtactctctctgctgacagacttgcacaaagtgataaaagactgctctcatggctctggaaaacagtgggggatgaggagaggatgcaacgtgcaccagaacacgtgctctgtttgaggactagacagaacattctgggtgccggttcctctgaaaaacattgatgtcacatcttgtggcagactacccccagtgacacgaaggaagagaaatggcttttgaatctttagacagggttaaaatgaaagaaatccatttgtgccttcagaatgcagagccaccggtacaaaaggtcactgacaccaactgctggcatcgcagaatacagggaaggagtactaaaataacaaaattgttttttcaggcactggatgcacttagctctcagtcttttgcaacgtgcttcctccagtcctaagtcaaagggtatgtgggaaaaacaacaccaaaaattttctcaagttctacatggtccaatatgcagattgctgtcctcggatgaaggatgacagatgtatggagtagaacaagaaaggggcttaaaagatgatttaagaaattgttcttactagttgtatgaagaggcttctgaacagtaatagttgagtgtggccatttcaggcaaaaccaacaggtattaatgtgggactcacccgatattaaatgtctgtttgggggttccatttgaccggctgaagatgacagggccttaggagaagcagcagacgttggaaatggggtggacaggttctaggatactgccttatgtgtgtggcggtagaataacatccaaatagattgagaagatctgagagccgtatgcgtagagatgagactggaagggcttaatactaggctgttatcattcataatggcagcaaaggagcctgaggatcacgaatcaaacttgtagggaattcttcagttataggagatagattgtgagagaagccaatgaagaagctacaggagacaccatcaggaaagctggatagtggtcccagaacccagtgccctcatagaatcgagagaaattttctcaaggaaagatgtttttgatattaaaaaagaagaagaaacaaaaaagaataaaggatggagggagatggggattggtgttggatttacaaaatgaaaatattgcctggaaagaagattttcctttgggatatattggataatctttatgccattagctctgtggaagggagctttccagtacactgcaggatgcttagacccagttggtgctggtggcatccacgacacacgaatgtgctaaccaaaaacaaaaaaaaaaaaacaaaaacaaacaaacaaaacaaaacctctgcaaacattgtcaaatgcctctggttaagaattacttattttctgggtggtggtgtcgagtgcctttaagtaccagcactcgggagcagaagcaggcagatctctgagtttgaggccagcctagtctacaaagagagtgccaggacagccaaggctacacagagaaaccctatctcaaacccccatctttcccccccaaaaaaaatcattcatttaacttactgtttcctgctgtggtctatggtactgcattagcactgccagatataaaaagttaaacatgcagccgggcgttggtggcgcacgcctttaatcccagcactcgggaggcagaggcaggcggatctctgtgaattcgaggccagcctggtctccagagcaagtaccaggataggttccaaagctacacagagaaaccctgtctcgaaaaacacacacacacacacacacacacacacacacacacacacacacacacacacacacaaagttaaacatgctaacccttaagaacactgtactgaggtgttggggaaatggctctgtagataaattacctactgcacaagcacaaggacatgagttcagatctctggtgtccacatacaaagttaaactgggcacaaccagctttggagagctagagggaggaggacccctggaacagaatcagtgaattccaaggtcagtttgaaggtgaggaacaatcaaggaagacagttcatcatcactttccatcctacacatgcatgtgtgtgtgcgcttgtctctgcttgtggaatgcttgggttaaagcacccagctattctaactttcctaaattgaattattctattctattattgttgtttattattttattaaagccaaatacatacattgatatagattttaagattctgggcttaatttgcagcaacctacatacaaaaacaaacaaaaaacctatcaacgtgtacatgtatgcacttatgtgtacacatacacaaggtagttattctctaatttaacagcatctctgtttcattattaagatatttgaaaagtaataaattggtatcctcatgcttcttcatcttttatcatacaccaatgctaaatcttctatcacagattaatgaagaaaaatttagatcattgccaaaaccagtaggcaattttcgaaattaaattttgtgtgaacaccaaaaactccaataatgtttttgccctaccacttcttgtggagagaaaatattcttactgatccacaagtatgttgtagggggaaaaaatcagattttttttttgacaagtccaactatatcatttatctttgggtagaaactatagtgctccttattgaaagggctccacagagtttccaagttcttagtttaaaaaaaaaaaaaaaggagagattttagccttttaacctaagactcattttgtatgaaagatgtcatacttacaaaaataatctcatgtgtgccagtttacttttcttcatggtgaccaaaatgcctggcctaggcaacttaacggaggagagttcattagggctcagtcatcatggctgtgagggaatggggaatgagtgtgtgccactggacgtatacactggaactcttcatcaacagctagataggcacagtaaaaggcacctgatgcagggccagaatatgagcctcttgatgacctatgtccaccagtagagtccatcttccacaggttcttcatgctcccaaaacaggagctgaggctaagtgtccaaatgcatgagtcctctatggagaacattccacagtccgtgtgagaagtcacaccccgagaaggatcctgaatgagaagtcacacccgatcctgaatagagtccaaggcccagttccatgccatttgggaacaagaaggagaaaatagcctcaccctccagtttgctgcctgtaaccctgaacaaagccctcaaagctaacacggcaccctgtgtttcctctacagaccgcatcatcagctattaaaggtgctattcagctgggaataggatacacagtgggaaatctcacttccaagccagaacgcgatgtcctcatgcaagacttttatgtggtggaaagtgtgttcctacccaggtaagaacgtgttagtttgaaatgattccatgctgaaacaattcacagtggcatcctttggttgaaggacttttctgccatgttcatatctacatgttctgaagggtgtgtgggtgggacctgtgactccaccatctttttgcttgagaatgtcctgcatttcctctgtggagcggtgagtgtcatccatgggtcagctgtaattagttgtgatgggtgcctggaagactgtgcaagaaggatcatgggattttgtgggtgaggataaagaaatctcagagtaaagtctgcctcgtgttttgagagaacttccatgaatcagcactggtgccaagatttttctatgcctaatttaaaagagggagctggagctatataaatggcttagttgttaatagcactggctacttttgcagaggagctgagttcatttcccagcacccacatggcaactcacaaccatctatatattccagtcccaggggattcaacatcctcttctggcctccaagagcaccaggcatacatatgatacacatacattcatacaggaaaacactcatacacataaaataaaaataaataaatcttcttaaaaataaataaatagttaaagaatggactggagcaaccacaaatggtcataaatctgaattaagccagtaagttgtcttttatgatgactttaacttaaatttcccccaggaaaacatgagataatgctgctgttttgatgccatatttgtaaaaccaccagagttgtccatgcatttatcagtctggagaagaaaaaaaactgtttaaaatcctatgtgggctaatgagatggctcaagtgaataaggcacttacctctaagcctgactacctgagtttgatccctaggactcatattgtaggaagagaaagcatctctcacaagttgttctctgacctaccctcacaccatagtatgcaaatgtgcacacacacacacacacacacacacacacacacacacacgcacgcgcgcacgcacgcacgcacgcacgcacgcacgcacaaaaaaatgtgataaaatatttttaaatacaaatacatgtggaaatggaaaacaatgatggaactgtatactggaggtgtttgtttctatgtcgtgtctactatgccctaataagtaaaataatttaagtcaattccactattgtaaaagacaatcattgttcagttgaagtgtcaccacaactgctgggttttccaaagaaaatggactacaaatgaagacattttccttggcgatgcttactttgtctctgtgactctgacgattggcatttcagactcacatgttcaaaatgagccgttttgcttatgctgggcttgatctcatccctcagtgttcgtgagggtgtgtagttgcatcccaaagcatcagaaaatcgatctgtgcaaaagtcccttaagtaaaggagcacaaacctgcatatgtctttcacacattctcctgtaaactttttcattgtggttatttttatgaatgggtgtaaatatgtgcacatacaccactatagtcaaactttctttgaactgccagctcccaaataatgacacggagatttcttactaattatgaaagcttggccttaagttaggcttgttcctaaactcttaaaacttaaattaacccatttacattaatctacattctgccatgtggtttgttacctctcctcattactgtatctgacttcctcctctcctacctagctgttggccattcagctctttattaaaccagtcagaaattgccttagtaggtgaggaagtacagacacatattcgcacagtgtgaccaaatttcccacaataccatggataaatcagttctgtctttctaccatgtacagcctggggatcaaactcaggtcattaggtttgtcagcaagcatttccacccactgagccatctaaacagccctaccccttatctcatagcatctctagactagtcatgcaacctgctaccctatgaatagttgcttactccaccactcagggaatattgacaagaaaaacatctaaccatgttcagtagagatagaattttttaaaactattttaatccataattgattgattctgtggtcatagaaagcaccctaaagggagcttgctgtatgtatgccccttttgttcttgggtgacttgttacaagcctatgccatccttatgaggaagagaagatggtggcttttcatttttttctttttgagtgggaggctaaagttacaaatacctggacttatgtctttgttcttcacattatcgtctccacgaacagcagaccagacacatcactagggaagcaggcttcatcccttacagaaatctactgtcacatttaacatctaccactttagagtattgctgcttttaaatgtcaatacaacattttttaagacctatgtgtcctagatataattacaggaagacaaatgaatttatgctgtgggtcccttgattccttccctggactcaatgtcttcatgagtttagcaaaggatcactgtagccgagctttctttggactaccagttcctgaataatgacacagagagtttttattaattatgaaagcttggccttagcttaggcttgttctcaactagctcttttttttcccaactagctcttaaaacttagattaacccgattatattaatctacattctgccacgtctcattacctcttcttagtactgtacattcacttcctctgagtctcactggctaagtcctgccacaatattcctcagaatcttcccctcaagttcctctctctgcctggaagtcccacctgcccccttctgcctatctattggccattcagctccttattaagccaatcagaaggttccttagacaggtgaggaagtacaggcacatcttcacacagtgtgatcaaatatcctgcaacagtccaccccagggtttctcacgggaggtgttgttttaggttagataactctgtgtgtaggactgtttgccccaagccctaccagtgatgatgtcctaattaccacaacagccaaaatcctccacaaagtgatggatacattgagtatgttgattgtgactatgttttcacagttagttgtgcatgtaaaattagcaatagccagacttagtggcacatgactttaatcccagcccttaggaggcagaagcagctgaatctctctgaattggagatgagcctggtctgcatagtgagctccaggaaagtcagagctacatagtgagaccctgccttgaaaaaagcaaacaaacaaaaagcagttcatacattgagtatatgtatgtgtgaatgtatcaaatagttctccccatgcccacatttctaagctcatctgaggatgtggaccaggataagtgaccacacaggctcgggttgtaaacaactgaaacgttctgaggtctctctggtaaccctaaaccatgggtttgcctcagttctagagaactagttgtttgaagtgacatgctgcttattaacattgttttatatgtattggcatttttcctgcatacgtgtctgtgcactacttgcatgcctgatggcctcagaggtcagaagaggaggaagtcagatctcctgtaacttgtggtagagatggctgtgagccaccatgttggtgctagaaattgagtctgggtcctctgtaagagcagctaatgattttaaccactgagcctctagcccctgacaagctgttttaatttacttccactctgaagcaacagcatcggtttcccttagcaaccaaatgcattgtgttcctttttttattttgaaatctctcaaagctaattttagatacacgtatttattctacagattcattttatagatagaaaaaggcctggtcatttaagattggaggaatatgtaacagtgcctgaccagtctctggttacctggtcttccaaaatcaaagtagattagtaaaagaatcgtgagcatccacccccctgacgggctactctagaaaattttcatttctggtgagatagagaaggaagaagttttataaactttgtaccatatgaccatgaacctgagatgacaagggaaaacaaagctcacgtcaagcatggtgttgtttatttgacatacaatgtgtataattacagttttaacttactctttttttttttttttttgagacagggtctcaggctagcctttaactcacagagatctgcctgcctctgcctcctgagtgctgggattaaaggcgtgtacatcatacctggctaacttactcttattaccttacacacttacatggaaggaggaaggaaggaaggaaggaaggaaggaaggaaggaaggaaggaaggaaggaaggagaaaagaatagtctgctggcatatgaaataattaataccctaagatcttgtcacttaactcacaagtaaatggtaagacacagttctggagaagtgtttttgggccctgtgcccataaaaatctgtgcttttccttctgctctcctgcaggaaatcctgtccctggtgatgctccaggctggcatttgtgtttcagaagctgagagtaaagtttaaaaatcattccattcctgtgaataattacctggctgaacacagtagctgttacccagcactggaaagaaagagtcagggggatccctagtgtgctgtgaccaacatagctgcattgatgacttccgggcttagtaagagaccttgtctcacataaaggggagaataattgagaaaaggcaccgcatgtcagcctttggtctctatatccatgtattctcatgcacacaaatacacacacatgcctgtacaaacactcatgtgtgtacacaaccacactaacaagtatatatgccacacacaacataatatattttcgaagggaacaatgttcacattttttacctcgagtgcactgctgtatgcgcacatatatcatgtgtatgcatttgtgtcagtctgtctcatttccaaggaaacctaagactatctatttgatactactccagacttgagcatagtcatcaagttgctgttccctagaaacctctttataagccaaggcgatcaacacaagaagctcagaatcaaccaaaaacaaaacaaattaatgcagcatccagcttcttgcttggacttgctagccaaagaatgaaggaagctgacgaaaggaacacttttgttggtcttacctcagactgttgaaggaaatctgcccagcttcgatggtatgagctagagagcaataagcaggagcctgagaaataagaaacaggccatactctgagcccaatgaaagcagcccccttccaaaacaggcgttttcttgtttgtttctacttgttgacagtcaagtgggaggtcagagtccacactgactctgttggcttctaactcttattcctccatagctggcatttgtaaattattacatgtcacataaattctgaagtcatccccggggacgtgcagctgaatgcatttcctctcataaatcgcaaaatgtggactgaggaactgtttggctgtgttgacaggtcatcacacatgactaggaatattcagccctgcttgcttagggcaacaacaaccatttataagttgaacatggtggcacacacctgtaatctctgcagtgacaaagctaaagcaagggaatcaggagctcaaggcactttgttctacatagtgaatttcaggtcagtttgcatttcaaaatgagtgtctgttccaggacccaaaagggagaggctagcaagatgacttcattggtaaaggtgtttgccacacaagcctgtcaccctcagtttaatccctggaacccacataaagatggaagagaaccaaccccacaaaactgtcatctgaccttgtatatttgctgtgtgaatgcatacacatatacacatcatttgtgtgcctacacatacataattagactaataataaattttaaggtttttttaaacccccaaaaggaaaacagcccggcaactatttatgataagtatactttgatatggaaattgacagttcttttctctagatcttaggatatttttaaaattattcatcagttaagaatcctggctgctcttcgattccttggtttgattcccagcatccacatgtcaattcacaactcattaactccagtttcagggggtccgacctacaccctcttctggtctctgaaggcactgcccacatggtggcacacaaacatccattcaaataaaacactcatacacatacaatcaaaataaatagatccttttaaaaaatatttcagatgttcctagttacagatatttatccagtatacaaaattcatggtgaagtgctttaatttgtcataccccatgactggcatgttgggagtggcccatcactgtttcaatgtgtccttatcctcgggccatggtccttcttgatgggagcttcaagacacccatgagcagagtgtattttttttttcctagagataaaattggcccaggactaatagagttagaatttcaaggcaaaatcatttttgctaatgttctctgtgtgtctcctttgtggtatttgaactgcagtgaaggtagcaacctgaccccagcgcatcactacccagacttcaggtttaagacctacgctccactggccttccggtacttccgagaactcttcggtatcaagcctgatgattacttggtaagaccctatcattttcctttctacagaatgcatggcgctatcttgaatagcagtggtgacaagtggctgtctcttagaaacctcaggaacatagcagacgttccaagttttttaatgtttacatatttggcttcaaaaatgcaatttgatgccatagctcttaatagataactataaaatctgctgtgtgcttaatatttaaataactgtggcattaccgttctgggtaattatcctaacagatactttataattaacttgaaagacttgggagttttaatgagtagactgtttggatgtcttcctactttgtcttatctcagacctgccttggtccacaaccatttcaattgacctggaatttcagatgacatttaaaagaagccagctagttttgtgcaccacatctcttcctacggtctctctccctctcccctttctctggtttttcaagacagggtttccctgtgtgaccctggctgtcctggaactcactctgtataccaggctggcctcaaactcagagactcacctgcctctgtttcccaagtgttgcaattaaaggtatgtaccactaccacctggctcggcagtctcttttttaagcatattttcagatgtacatgagcacattctatcctcagctctgtctcttctctctatcctccctcggacacagcagcagggacagacacaatagcctgtgtgtgatgtgcaatgccaccctcagggttttctcattcccattcagagggccacagcccaggtttcggtgagagggatagcttatgtcataaattgattgctgttaacaccttggggcttttcaaactctgtttttaaaggaaccataggaaggatgccatctaatactcactgttttcccattcaggatgatctcagtcagactgagagtggtacttttcaggggtgatacaacagtgtttgtcactgatgatagagtgttctgaatgtatcttacaatatggacaagatatatctgaatgtatcttacaatatggacaagatataaagaatgaaattcaaaactggtatctgttccatgctaatgaaaacccatctctttagttggtacttaagaaaatgatgatttcttttttagaatgtgtatgtgtgtttgttgtttgcatgtatgtatttctgtgtgaggccacacacatgccacgtggtatgtgtagaggtcagagaacagccttgaatggagaagggtctgttgtcccccactgtgctgtgttctagttgcactgcactagtttgcctgtgagctgctgggatgttctcctgtctccacctccaatctccttgatggagtgctgggataacagacagacaccacttcatctggcttttacctgggttcctaggagccagactcaaaggaacaggtttttggcaagcacttttacccactgagccattttacagccagaaagtcattatttcttcccaatgacataagatgtggagagaaccaagtctctacagagcagtgatggtgatatagcaaggtcctgggcaccctggcctctacaagtcccagtggctctttttgtctctctgaccatctgaaataccagcgcctgtcccagtccctcccaactcaagcacatatgcctgttctggaggtgtgtcagggagaattcgtgggtttctggccattgggtaataattgaaggtcaccatctctcagaaaatatgtttagggaatccagtggggtatcataatgaaaagggcaaggccactcttttgctttgggccacacactggaaactaatggcttctccttctggatatcattaaacttctgaccaaccaaggagataccacaacagttcacagcacggctgatacaggcatctgtccatctgtcacggcactgctgatgcaggagtctgtccatctgtcacaacactgctaacacaggcgactgtcacagcatgggtatgatgtgacaagatggctgctcatctcaatcctgctgtgtccattgcttcacaaactgggaaagctcactctgtcatttctgatcacacacagttgctctccttagaaaagttcttttctgaacaacttcccatgtagcttacctacattaccttaatgagtctttgaaaccaacaaagtgttcttcacagagcaggagaacttacagaggagtgtaggaggctaggccactggtttcagtcatctgtctagctggtctccggatattgggaagatactttgcactagcctcatgctcctcacccagcaagtcacaggcatcaagcatggtctccaggtagcctctctccactcatcagagtgttgatccatcctgaagaacacaccctgaagaagtccagttcatctcacgaggcacattttggagccactaagtttaaataaagcacagaagacaaatgggcatgtctcaaaaaggtctctgtaaagaaagaaaggatgtgacacaaataccaagtcctgacatctgccaagcggggctgttgaaacacacactgtgaagatgcatggctgtaagcaggggatgagagacaagaccattaatgagtgattgccagctccatggatttgaaatcgcatccccgttagttttatgctatcctgtctggatttctgccagaattattgtgtctatgttctcagtttcattaaaattcaccatgtgcttgctggttacaagcttcatgtcgaagcatgtgtaatttggatagggagactgcagggtgaagtgcttctacgtgcatagcactgtgaactcttcctcatttgttccttgacaagcatctcccacccaggtggccctgggcatgtctgtctctattgcaataacaggatatttgctccttccctcccctccaggttttcacaaatccagtataactcataggaattactcaaaggaatttgtaagcttacctccaccagtaagagtgaaagtggattgagagttgtatgccatggggaaataataggcaagttcatctgtgccatgtggtacaagtttacattgttagtttgccttggcagagccccgttgggatatactttctgatgggtggatatagcagggaggccttgcagcaaattgagataagaggatgcaggcatttgagcatctttcacaaatggcatgtgcctggaaggcacatagagcccaggagtgcacatggagacttgttgatcacagttgattaaattctctttctttgttctttaaaatcagccttaagaagttgctgagaacatagtaatgaagctctagagttctggagtggaaatcatattcctatctagtatcagaatctcagtcacatacatactgatggtgtgctattcctaatgttcattcaaaatgttaccaaaataggtaagacaattgtctactgatagtcttttataaattacatactaaaagagtatttggcaaagaattgatcaagttgtccccataatagatcaatgcttatagagaattttgatactttattgggagagatatttaggaatgaatctaggttttgccagacagatttttcttgcttttgttttaaataatagtcttattgtgaatttcatacaatgtattgtgaatatagtcactccctccacagctcctcccataagtacctttctaccctcccctccctactcacccagctttgaggccccttcaccccactgtttagtttctactgcccaactactctttgtagtggggtccaccctgtaatgtggttgacccgccaagagtcacttcattaaagaatactgaatctccttctcctagctgacatgaaacgccaatagctccttagctagtggtgagatttcttgtccatttccctgctctacgctaagattttgtttaccttgaacttgtatgggtctcgtgcgtacttctagacagatgttcttatacaccccatgattcctctatttgctgtttctgttcttttattttatactctcaaaattttcattcctactcatggggagattctatgggcaactgagtttcagtgaataaagtcagaatttctaaagaagtctgtattctgtcttcatttttcataagagcctgggatcagcagcagggtcttgcatttgtgactcaaccttcttttcgtctgtcagggtgtcttcattgtgtttggagataacatctcatgactgtttgtctaaaacgcacagtgcatactgggtagaaccagttcttccttgcctgggaaagtgtgcaatgaaggctaggtgcctaatttacctgcatatcatcatgtaataatttttaaatagttgtaataagaaattacactgccttgggccttaagggcatttaccttaaaagtctttcagctgctttcaaaattagaatttctttttgagacaaggtctcatgctgtagccttaatatggccttgaacttataaagacccacctgactctgcctcctaagtgtcaggattaaaagcatacaccaccatacttgttgatattatgtttattttggagggtttcctggacctccagcttagtcactcagtgtcacataacttatgactggaagaaccacagttttataaacagcagttgatccattcatgccctgtccactgtccacccaatccatgtggatactttgcttgcataaagaaatgtcttgtctacagtctgatggctactgtgttttcccaacctctcctcaacatgcaggggaggttgtaagcttttttgatgtgtcaaggggctaggccaggtggttgtggccagcatttggaaggctgaggaaggatgatcatggcttgcaaggccttatatcataaataaaaataaaaagccgggggggggggaagataggagttgccagtgacttataaataagtacttgcttataagtactttctcttcttacataaatgtactccccatgtctatgatgctgtcaaagcaagatgatgttaaggatgacatctacaaatggcctctagtcatttctattagtctttgtctctctgtttctctctccaaaacccctccccatcacttgctttctttcctgtgttgggcaactctcacaaaaagctttgaggagttttcaactttgttttaagctacctacatcttcaagatgtggtcccatgtgttatgacactgtattaaacagaacagtgtggttctgggaagaggaagcagactcatgagccaatggaataagattgtgagtaaccagtggaataagagaccagaaataaaccatcaaatctagtgcaaatagatttttcaacaacaatgtcaagaatgcccacacacacaaaaaggactatctctccttttaattgtgttgggaaaactggttatgtaggatctggaaagatagctgagtggttaagcgcactggctgttcttacagaggacctgagttcaattcctagcacccacttggtacctcacagccatctgtaacaccagtctcagatctatcatcctctcctggcttccaccggcactgcatgcatgtggtgtacagccatgcatttgtgcaaaacactcacacacataaaagtaaaatgaaatcttaataaagaaccgggttatcctcatgcaggaaagttaagccagacccttgtctcaggctgggagtgtagctcaatggtagaacatttgcctgtgcatgaagattgtttccacacccaacactgcagaaacacagtgaaaaggcctggagacgagagtttatatcatatttgagaagatgacaatagagctttggggaaggactgatgagtgagacagctagaaagtggcactgggccacttgtggtcataagcatgctgtcagaagccatgggaagatgtgccacaaggatggtcaagatcagggttacatttggaaagacccctggtttccagaggagagggcactacagttgagaccaggagtgtaccctagaggccagacacaagtcgataaaaccactgaacctggggtatcggcaagggagatggtgttcaggacactggtggaatcgagcatttgaatacaaatgaggaaataagaagtatcaaggctagtcaccaaggttctggcttggggaacaagacatatagagtttcacctctggagataagaaaatagaggaaagacaaaagataagggccagatgatttcgagatgtgattctctgctatgtgggaactggaatccagcccttcttctgctcaccacacttgtattctggccacaagctagatctgccatggtttaaaaaaaatccttctcattatgacaaaaaaaagtcatatattttgtttgtttgttttttgagacatggtcttttctctgtagtggtactcactgtcctggaactcactatgtagaccaggcttgccttgaactcacaaaggtccacctacctctgctaggattaaaggcatgtgccaccattcccagcaaagccatataatttaatcatgaccttgaaatgaatttgattgcatgcttgttgtgtgtaaagtattgagttataaccaagtagagatatcagttatgttagagacttctagagccctggtggcctgggatggagatgtcacattatcctctgtatagtcagtgacagtggagagtgtcccctgggggagtacaggaaagagaagagagaggttctatgttgaagtgatgaatatgcagggacactcgaccttcatggtcatgctgtaaacagagtatcttctcacaagacagatatgatgaccccagttctgtcgagtggcactggggatgggcagaggggagagcatacctcttttccatgatggaattataaaaataaatgggaatctcccaggaaagtacccaaggttacctggcacttccttgtacagctcatagatggtaattactctttccaaaaggccaagggagctggagtgaaggccaggggctcagcagttaagagcactcgttcttacatagaaccaggttcagttcccagcatccacatgttagctaataaccatctgtaacaccagttccagggtaaatgattccctgacatatatggccattgcatgcacatacctcacagatatacatgcaagcaaaacacccatacagataaaatagaagtaaaggaatcttttttaaatttctcaaaaaggccaagatgggcattccttggctcatcctccgtggaagcatcatacacattaagaatacttcagtgctggtgatggtggtgcacacctttaatcccagcacctgggaggcagaggcaggcaggtatctgagttcaaggccaaccaggtctacagagttccgggacagcctggaactacacagggctacacagagaaacctgtctcaaacaaacaaacaaaaaaaaaacaaaaaaaaaaaaagattactttagccaaactaagaagatggctaagacagcaaagtacttgtcttgaaatcatgaggacctgagttcaatcccccaaacccactttaaaatgacaagcttgataacatactcttgtaatctcaacactggagaaagagagatgggatcactgatacacgctggccagcttgtctagcctaattatttaatttattaattaatgagcttcagaccaatgacagactgtctcaaaagagctgggtggcattcttgaggatggtacccaaggttgtcctttgactgatatacatatgcatacacaaacatacacacacacacacacacacacacacacacacacacacacacacacacatacacacacacacgcacacatgcacacatgcttgcatgcacttaaaacaagggtactttaaccatgcacggtggtataggcctgtaatcacagcactggggaagtagaagcaggtagatcatcaatttgagatcatcttggcctgcaaagagagaccctatctcaaaaaaagagtataattttgcatgtatttgatgtatctatgtgtacatgtttttgtatgcacataagtgcagccacatatatgtgtgtagaggggtagaaagtgagagtcggtgtcagatgttttcctctactgttcattctctgtattgttttgagacaagacctctcactaaactggagctcactgattctgtaagactaggtggctttggagttccagggatctatgttcctgtctcagccaccccaggtccagttacaagccacttcacccagcttcatacatggctgctggccccaaaagttagctttaaatgtttgcttaggattgggcattgaggctcatcagagaacatctaccaagcctgacaaggtcctgggttcagtccagcactgtgaatacatcaataagtatgtacatacatacatgaagtgatttcatgtgtatttacttttttttcagtactccatctgcagtgaacctctgatagaactgtccaatcctggagccagtggatccttgttttttgtgaccagcgatgatgaatttatcatcaaaaccgttcagcataaagaagcagagttcttgcaaaagttgctgccgggctattacatggtaaagggctgcacagggctaccatctctgccttaggatttagagggctttgttctttggagggctttgttcctgtgtgttttcctttctttgcgttcagactattcattgaagagattttaagaaataataaccagggccagcaagatagctcagtgggctactacgtttacaacataagcctggaaaagtgagttcaatctccaggatggccatggtagaaggagaaaaccaacttcacaaaattatcctctgatcatggcatatgtgtgtatacaaatcacctccatatatatatatacacaataataataataataataataataataataataataataataattttttaattctaagaagtgataaccaaacatagaggtgcacacctgttagcccagcatttgggaggctgagacagaaggatcacaatttcaaggccagcctgagagacactgagaaaccctgtatcaaaagagaaaaatgatgtaaatgagaaccgagtagtgaagcatagttgttgcatcacgggcctaggtttaagcgcacctcaatcgttatctcactgtggccctggtaatcgaagctgctgctgaacctctgcacccttgtcctttagaagctgagaaacagtgtttttgcaatgtcgttgtaatgatcaaggaaggaacaggaagtaatgttcttcacacccagcagttgtcatccaatggatggtgacattcattgattgcctgtactggttaagcaaggctttgggtattgatcctattaagtcctttaatccttatagtaactttaggcaccatagatgttgccagggcatagatgaggcaactgagacacagacaaactggcaaaaaaaaaaaaaaaaaaaaggcaagtgattcagagagcgagagctacagaagtcaggctaccagaggctatatcccagctcctaggccatacagcagcatctaatctgtactagcttttcatacacactgcatgccagaattcagaaccataagttgaacaggcctcttaggtactttactattgctgtaaggagacaccgtgaccaaggcaactcttacaaagaaaaacatttcattgggagctttgcttacacttgtaaagggttagtccatggtcatcatggtagaaagcagataggcttggcactggagcagtaactgagcttctttgcatccttatctttgggcaaaggtggggaggtaggggatggggcctggcatgggcttttaaaacctcaaagctcagccccaatgactcagcttctgcaacaaggccacacattcaaataaataaataagggcacaaataagttctacatttatcgatctataagggttctgagaagccaggcatgatggcttgtaatcaagcacttgaggggctgaggtagaattactccaagtccaaggccagtaattccagggcagcctgtacttcagagtaagacactgtctcagagggggatgaggaggggagacatgtaagatctgggggagccaaagtcttccccctggaaataataggggaagagccctgccattattgacccttgttacaactgtgttggaagcgcagggtgactttgtgagaagtctctgggacagagaagagtatactcaatgttcttgtgacacaatttacaatgagaagatctcccaggaaataagccagggactggagagatggctcagtggttaagagcacttgctgatctttcaaagaacctgagttcagttcccagcattcagtggtccatagctctaactcctaaggatctggcaacctcttctggcctctgggagcacacacacacacacacacacacacacacacacacacacacacacacatgtacagcatgacacacatgtttacacttaaataaaaataaagaaaataaatcagaagtttctagaaataataagagtccttctgaattgcaaaacaagataaatttgtgttcaggtagattcccatttatttcattttctagaagatgctggaagaaaatgaggggaaaagatcttgcttgtgatgacagtaattcatgacaaaaattattagaaaactgaaggtaaacatataggaagacattgtaattcttttggagaaacaagttatagtgagtgtaacataagaaccataatcagttcaggaaagactgtaaaactcataaatctttcaagacaaatgttcataaatctgtctgacctgagagtgaagctggggctatgtgtggaggaggaggaccagcgagctggggtgtagcatgaataatataaagcctgagacagatattggggttcaaactgaagattagaaaagtaaaacaaccaatacattagggagatcttacctccaccagggctggggtaatcctgacctcaacatggctgaagactaattgtccaagactgaatgccagctctgagaccctgctcctgtcttatttacctgtttttctttttccaccatgtgattcccagggacccgacttggattgtcaaggcttaggagcaactgctgttatttactgagccatctcaatgatcctttatatccattctttgttttatgtcctttagtaagctatttgaatgtcccacttactcttaaaatacatcaagaatgggtatgtgtgatggctagttttgtgtcaacttgtatatgctggagttatctgaaaggaaggaaacttcattgagaaaatgcctccataagatctagctgtaaggcattttctcaattagtgatcaatgtgggaggaccagcccgttgtgggtggtgccatctgtgatctggtggttctgggttctgtaagaaagcagactgagcaagtcatgaggagcaagcctggaagcagcacctctccatggcctttgcatcagctcctgcctctgggttcctgccctgcttgagttcccttactcgctggttttgatgatgaactgtgatatagaaatggaaaccaaataaacccctcctctaccccaagttgctgtggccatgatgtttcatcacagcaatagtaaccctaacttagacagtatgtcttctctatttttataataaaaagaccatatactatgaaaaaatatttactccatatagaagaagaaaaccatagaaacgcaggatggatcaagaactgcaacagtgaggaacctcagaagaataagcaaatgataatagcaccgaattatctttgaggtagctaaaatgtatcaagaacagtaactttctacaataacctgtgacactcagctttttaaaactgtaattttcatcagccacgcctagagagatattggcatctggtagcatttggtgttggtgagagtaataggagtgcgtgcataatcctacaggcttgcttgcaaattggtctcaccgtttaggaagacagtattgcaaggggaattaaattttagactgttcaccacttactccccagcaatcaattttctccttagctaccttagagaatagtcactagcagtacccttcaggattttgcctgtgtttagctgtagctaatttggagcattatgtccgtgtttgattcagcttttactgctgtgagtttagaatggttattgctattccaagagcagatttagaaagaaatcagcagagactctcgtgcatccatccattctagctgttcgtcaacagaggaatgagcaaagacaatgtggtgcacatattcaatgggacttcttttcagccataaagagggttgaagttatgccatttatagggggaaaacagtgtaactggagggaattgtattaagcaaactgagtcagtctcggaaaatatcacatttgtcatttgtgactcttagatgcataaaagtcatgtatgtagggacaatgagacacctgccaccaagcctgatggcctaggtccaatccctgggacccacatgctggaaggagaaaagcaactcccagacactgtcatgccatagcatctgcacacctgcctgttcccacacaaataaatggaaatggaattctaaaatttgagcagccacttggttatccaataccaaatattcatccctgaagacatacacatacaaggaatgtaatatagactgatgaggtcatattcatatatatatatatatatatatatatatatatatatcattaaagaaaaaaaggccatgagtttgaaagagagtaagggaggctatatgagaggatttagagggaagaaggggaaaatagtgtaattattgtaatctcaaaaaagaaaaatttcaagtatataataacatgtgacatgaaaggatgaaatttctgaggcaacaaaagggattgataaggctgggtgagagaaggtaggagaggtcaggaagtggaaagcgtaaattgaacttttttacagtggacattcacaactcatcctgtgtttagtcatgttacctttttttttttttcattctagaatttaaaccagaatccaaggactcttctgccaaaattctatgggctatattgcatgcagtcgggcggcatcaacatccggattgtagtgatgaacaatgtgttgccgagggccatgaggatgcacctgacctatgacctcaaagggtccacatacaagcggagagcatcccgaaaagagagagagaaacccaaccccacatttaaggacctggacttccttcaggacatgcacgaggggctgtattttgatacagaaacatacaatgcccttatgaagacactgcagagagactgccgggtaaggaagtgtctctgtgatttcctttgaagtaatctcaattgtgagagctctagctgctacatgcccatagcatagacatgaggaaggtccacaatggctttgtggagtccagtctttccctgctgacccgggctctccggatctctgaggaaatggtgggtgataagagaatgacctggggtctgttatcacatctttgttggtttttataataagctctgtcagctttctttgataaaatgaaatgagaacttttactttccttcctcctggggcggggcgggggggggggtagttgaaaaggaaatgaaacttagatttaatgcagaaaccagcaaggaaagtcctattcaaatcttggatgaaatgggatttcgactgtggagacaagtttagagaaaatatacttagagggattaatgaagggctccctggagacccagtgtgagctgagccttgacagacaaacactgaatatttgctgcaactgttttgtctagggggcaacaggaatgaggctgccagacagagctgagtgctctgtgaaagtgtggttgtctgaggtgagaatgggctccccagcctgtgttgcatagatcgtatcatatccgtttataaatacatatggccaaaaccctagaggaattgttctgatatggtaaaagtgagtaaaaatccttttggagaaaaaaaaaaaaacaacctgaagatataatcctgaagaatgatgatgatttattaaatatacacctcagaaataaccttggaatgactgatggggggcgggggaacttggaaagtccagtcaggccagctagccattttgaacatcgttggactgagcagcataatggtacaggctggggcctaggctttgccaaggttttctaggtaaccaataacaccactagtgcatgccactgagaaatagcggctatgctgttcaagctgtggctttcttgatctcccctgggcctggacaagcgatgggcattattgtgagggagaaagggcctctcccacaagcctggccacgctgctggtgaaggaaggcaggctcagcactctaatgtgtacagcagagaatccccactgaggaattcccctttcactgggcttccttttctcctgccgcgggatgtatggtagcacatgaaaataattctctggattcattttccccattaacactactgctgtaccattacttattatatagcaatgctagatcaactgcacagtgtttcctggtagcccaagacttattagtcgtcacttccttcattgagtgctttgttggtgtaggcttttaatcccacacttgggaagacagaagcagacagacctatgaatctgaagccagcctggtctacacagccagtcagcactacagagcaaaacctgggggggggggatcagagagagagagagagagagagagagagagagagagagagagagagagagagagagagagagagagagagagagagagagagagagagagagagattgggagaaaaacttatccagaggtcagagaaatggctcagcagttaaaagcactggctacttttcaagaggatacaattttgattcccagccccaacatagtggttcacagccttctgtaggtccagatccaggggatccaacaccctctcctggcctctgcaggcaggaaggaagcatacatacatgcagacaaaatggccacatatgtaaatttttttctaattaaaaaaaaaatttaacttatctagtgttgcttagcaagtcagtgacaaagctcacatatatctggggacaaagcatgtaatctaaacaaaggaaatttaaagattcactctaaagatctttttaagatttacttttttattgttttgttttgatttttgaggcagggtttctctgtgtgtagctccagctgtcctggtagacaggactggtctatagactctgtagaccaggctgttctcgaactcacagagatccatctgcttctgcctcctgagtgctgggactaaaggtgtgcacctccaccaccacccaggtactttttattttttattcatgtgtgtttgtgtgcctgccctgggggatagatatgtctgtggaggctagaggaaggtgatggatcccctgattctggagttacaggctgttgtgagcccctggcatgggtgctaggaagtgaactcagctcctctagaagagaagcaagcagtctgctccaacctcaaggagtttctcctaatactatcttttgtcttttgacaattcataggaggagcagtgggaaccaagcaaacaaaaaaaaataccctgcagagctattcagctatctcgaggactcatgtttttcctttaaaaaaaaaaaaaaaaaaaaaaaggaaaaagaaagaaaacacacacacacattttgatggaaaccttttatcttgtgttttttctatgattgcaggatgtgggtgaaaagttattttcaaatccccagagtgtagtccaaggccaaggctctcaggtcttggatttgtttttttccttgccccctgcctctgagtgtgtgtgtgtgtgtgtgtgtgtgtgtgtgtgtgtgtgtgtgtggtatgccttttctcaatgatattgaaaacctttgtgaacaatctgctaaggccacatgcttctatgccaggaagagaaaaggtcaaatatgacattgcacaggattttttgtgtgtgtgtgtgtgtgtgtgtgtgtgtgtgtgtgtgtgtgtgtgtgtgtgcttgtttcctgagcccaatcctgagagaacaaggtcaaacataacttttcatcaaaaatgagactctgcaggtgtgcctgttgattttctacttttttaccatgttgttctaagaaacatagaaggtagtgttaaggaatcaaattcatttgaaatttgtatgcaacgtaagtcgtggaacttgctcttctcatcataaatactttcatccctgtgatatgggaacatgcaaatgctgagcctgactccagtccctgacctgccaacttatctgtgatcgggatccagtaactggtactggaggcagagctgtactttgcaatgctgggtttggaacattgtcatggattgctttgtaagtctgatgagtgttgtgttagagtttctattgatgtaataaacaccataaccaaaagcaatttgagcaaagggttatttggcttgcctatcccaggtccattaaggggagccatggcaggaaccacccaagtcaagaaatgaagcagaggctatggagaaacactgctcactggcaaccccatgtcttgcttagtcggttttcttataccactgaagaccaccagggagccctgggatggcaccatccaaagcgtactgggccctccaacatcaattgttaatcgagaaaatgccccacagacttgcttgcaggctaaccttatggagacattttcccaattaaaattccctcttcccagatatctatgtttgtattgcatggtaatttatcattatggttagtgtttaaccttctgctttccttaattttcatttattagacagatacaggaatatgttgattttatttgtttttaaaacttgtttattttcaagttttggctttccttctgtgcatctcctctactcttcagaactgagctttagtgtggctatagagtacagggatctagtgtggctgtggggtcactcacagactggtgctggtacctaacatctgggaatctcttctgttaaaaatcctactgtctatgtgaggctccagatacaagccaaacatagaacatttttatggcagtgctccagttggagaaaggggaaccaggcttatattgggacatgacctcattgctgaacatgggatgagtgacctcaatgtttgatcaatggccaaacagtatgagagatgcgatgatgatagtgtactgtaagggtcagagtaggtgatgacataacttgatattgaagggtgaaaggaattctcttggtaggcaaagcagtagaaacatttttaagaagaaaaaaagcaatgtatattagatatgaaatagcatgacacattccagtgactatagttgtttgtcattgccgaagctaataactagggaaggcatgtgaggtaagaaagaagtgcatccaaatatttgtcaaaaaacgttttcagtgttatgagggccttatcgaggacttaaaataacaaatccactagacctctagaactcttatgcactgttgatagaaatgtaaattagtctagacactatggaaattagtaaggaggttcctcaaaaagtaaaaatagaactaccatataatccagccttgctactcttgaatatattacccaaagaaacctatcaacctaccacagagacacttgcacacccatgtctattgcagcacaattcatagtagccaaggtttgtaatcagcataggtgtccatagatggatggatgaataaagaaaatgtgatctgtatacacattaagtcctaaagaatgaaattaggtcatttgcaggaagacagatgaaactgagtatcatcctgttaagcaaaataagtctgattcagaaaggcagtgttgcatcgtgtgtgtgtgtgtgtgtgtgtgtgtgtgtgtgtgtgtgtgtgtgtgtgtgtaatctagaatatatacatgcatgcatgataggggatagaagcaggacttatttggggaaacagaaaggaatcagcaagaggaggaaaaggaagcaggagaggatgaatatggtcatgatatatgacacaattagatgagatttcattattaactatatcactgtgcacaattaactaaaagtaaacaaataaaaataaaggccccatagcagctgccccccagcttcttctctgtggttttctggacaggcacagagaacctgctaactgcttgttgttagctttctgcccactctccaacctttctttcatattctgccataacatctcagactaggagattccatttcccttagtctgcgtgctgttgggagacccctgtgtgactcattgagccagcttgatctgtgttgtccgctattccctgtggattgcttcgctgcttcccgtcgaaagctgttctgtctggtctcttttggattgggctacatagattcactgtacagcaagccctctaggaaaggtccccatctctctgtctgatttgcctggtgatacattatcccctgggtgtcagccttccctttgtgatggccagtccctcaccaccttcatcctgtggtacatgaaacacttgaaactcttcctgaaagcttatcatatactccaaacctgctgcatctggttcccacacggaatccaaagggccttttccatgtgagcatctaggtcccaggacctccctgtccccacattggtactccctactgcctgtgcatgggggaattcagatatgtaaataactgctcccctttcttgaagcatttcctatccacccaactctgccagtgcactgtgatggctatccacttctaccggtgaagttgtttcagagaaagagtgatggtgactgatggtatctcataggccacttgctgtcacaatcagaaagtaggaatccaatctcctcaggctttcagcatggtagaaaagccaagatgggcatccatgtgaaaactgttcttccgtgtgctgtgttgtcttccccaggcctgcacccttttcttggctatcctggtccagacaacatgaccatcaagtagctggttgcccagatcagtgccctgactctggatatcttttctttcttcctctccccctctctccacacacagtaaattgccatgtctcatccagtctgtctcctgagtaccacgtgaatccaccttactggatcggccttgatggaaactatgggtattcatctggaacttcaatagtctcttcactcattttcagtaccactaacttccaactcatgcccctcagtgtaccgccttattctcttggcttactctgccagaccatgttttcctatcttcttttcttatcctccatttctcatctgaggactcccaggacaccccttcctctgagatcaacatgctgtgtttcctcctctcccaaccttacctctttcatgagatttaataccctgttattttctcatgatcagatccgtaagccctagccgttgtctctgcatgcttggtgctcagtgggtaattagcaaatggctcttggaagctgtgtttaaacaaaagaataataaagaggatattggaacataaagagaggaaggcatgggtgctgcttcaagaaatgtctgctatgacttctgtgtctccagctactcttgcagtcccattgaaggcatcatccagttttgctgaaatgcataccaaaaatggcattgagaatttaataaagctgatgatttccactttgaatcacttgggactagagctgcactggatgtcctcatattgagtttagcagaagtgtgtttatatttcagtgatttttcccatggaagccatgttgtaatgaccatcaaacccttatttgacactgacccctgcctcccttaggtatgagtcttgtctctccctgggagaggtttttaaagcttcttaattataacacaaaaaccctctaataaacaatccttttgctttcctcatgcagatggttatctgcttcaaaattaaaatggaagcaaagtagaccagcatgattaataaacagattcatatctgaattttacatccaaatgacagattgccctctgggttatatttgacacagcgaagaattatgctagtttatttaaaggatatggggggtggagagaagaggtgaaatactttgaaatgggtgttacttaagaggccatggtgctgttcacatttgtcagtgaacaggcttgcttataatgcaagatttatacacatgtctgctgctgggtgtttgactttaggatcgaatgggaaggggagaagatgcgacccactggctgggaaatctgccagtctgcaatgacagattcagtcttccccttcctgcatgcccatgtgaatcctgtataaactgcagaacccagggcctgccaggatggctcagtgggtaaagtacttgctgtgcaagtgagaatgtctgagtttgaatccccacaagccagactccatatgccgcagaggcccttgttccttcctgagccccctctacggtcatgtcactcgctccctgctgctcccagagcatagcaaaaaaaaaaaaaaaaaaaaaaagtgattacgatgaaattttgtaattgaaattttatgtgtgaattttggaagagcaattatgaattgttttgtacttgtttttaatttatggggattatttttttctctgttataatttatctatgaaaatatctagagacccatgtcatttaataaacttgacaaattagtacatcttgcaatattttgggagcactctagggaaagtgagagaatgacaaagtctattactgggaacttgtgtttataacctaaatatttcttaatccttcaagtgggagtcatattagagacagtctggataattaatggcctaaatgagtcattctacatttattatcattccttgttaagcagcaaagttattaatttttcagtagcgcaaaatcgattttcttttctcccacaaatcactgttatcataaatattaataggcccagagaatttaataaaaccggcttctactgaacattttgatgagccaagtgagctgccccagtgtatggcaagctcttggtttacagactggatgcttgtgtgcctggccttttctgggtgggtgcatgagggcttatttcacgttaatttggcattatgattagtacttaccctctaggtatattttctgttaatttgttttagtgtaatttagacagatttgaaggtggattgtttttgtttctgatttttgttgttattgttttcagtgtttatttgttttggatttggggcacagttgctttctacatactacaggacagtgtcaaattcctggtcctcccgcctcagcctggaattctgatgttatagtcatggatcaccagacctgtcttgctgtcaaagataacctgaaaaagaaaggacaaatgaattctttttccacgcagatctttacaagcactataatgccacatgatactgaatttgctcgactgttttaaattacattggggttttgctatctaacatattagttactctcatgctataaaatgtaagaataaatcaaatttggagtcatgggacaaataaatgaatagaactaactctaaatgaaagacagtttgagctgggaggaattcctggagtctgtgggaaacaatggcacagtgtctgacactctctagcctgagctaaggagagatagaaacacctagccaaaccaagcacctagtgagaacaacagacaaaaacagaatgtgtttgcaaggactgtaaatgtttccacctgtaaagtttttttttccctttttttgttttttatttaaattttttaattactactcatattaacatatccatcccccccccattcccttgccctcccaccctccatgttcccacaccccccaacccagcccccaactcctccccagggatagtgagaccctccaccagggaccttcaaagtctgtcatatcatttggaggagggcctaggccctccttgctgtatctgggctgtatagggaataggctcccaaagtccatttgtgctctagggataaacactggctccactgttagaggtcccatagaccgtcttggcctcctaattgacacccacattcagagggcttggtttggtccaatgctatttccccagctttgtgactagggtctctgtactctcaccaggtcaggtcaactatttctgcgggtttctgcagcaccatcttggcttctttgctcatctctcctccctctccacaactggattccaggaggatggttcagtgcttagctatgggtgcctgtttctgcttcaaacagctactggatggaagctctaggaatggtaaccaaggtagacatcaatctcattataggggaaggacatctccaccactgcttggattcttagttggaatcatccctatggctcccctaacatttcccctgtgccagacctctctccatacctgtactgtctccctctatcaaggcatctcctttcttgccctcctccattcctctcctgtctcagtcctcttgttctcctcccccctctccttcttttatggaagtcacttacaacagttggggacagtcatatacaaatcacatacacccttcaccccatgtccccagtggtagcattttatatgacttcaacataatattactgccaggaaatagacttgaatagactttaagacttcttaacttttccagtttttgtgtgtgcttatgtgtgctggaggtggcttgtgtgcagttatgtactaagtagatttacatatccaccccaccagggtcaagtacagaacagctccttctcaagggtcccccgagctgccctttcctagattcagccacctccctcctttatagtccgtccctaatctcaagcaactatgaatgtttttcatgcctataatttggcatttcaagaatattggctgggtggtggtggcacacacctttaatcccagcacttggaaggcagaggcaggcagatctctgtgagtccagcctggtctacaagagctagttccaggacagactccaaagccacagagaaaccctgtctccaaaaaatagaagaagaagaagaagaagaagaagaagaagaagaagaagaagaagaagaagaagaagaagaagaagaagaagaagaagaagaagaagattgtatccaggacagcctgctcagagacatctgacgccagggatctgctcaccggatccgaactcggcagcaggactcaacacacccagacactgccaaggccccggtaacagtgccacctccatccactagaagagagcagacatcagagtattggaactgtttgcatctaccagaagggaaccttggtcccacacccaccaggagaggaagagattcctgctacacccaccagaaaaaaggatgggaagaggacaatgtaaaagcagattcaacaacagaaaacccaatatgacatcaccagagactaggaaccatacaccagcaagacctgcacatcacaatgcagatgaagcagaagagaatggccttaaaaacatcttcataaaaatgatagaaggcctcaaagaggacatgagaaaatcccttaaagaaatggaagaaaaaacaaaccaaagaatacaagatatcaacaaatctctcaaggaaacagtgcaagacctaaaaactgaaatagagacaataaagaaagcacaatctgagtgaatgctggaaatagaaaagctgggtaaatgatcaggaactacagacataagcataaccaacagaatactagagatggaagagagaatctcaggtgttgaagacacactagcggaatagattcatcaaccaaagaaaatcttaagtccaacaaatccctatcacaaaatatccaggaaatatgggataccttgaaaagaccaaacctaagaataataggtatagaagaaggtgaagaaatccagctcatagccacagaaaatatattcaacaaaatcatagaagaaaactttcccagcctaaagaaagacatgccaatgaaaatacaagaagcctacagaacaccaaatagactgaaccaaaaagaaaaggtctcctcgccacataataatcaaaacaacaaacatacagaataaagagaaaatattaagagaagcaaaggaaaaaggtcaagtaacttataaaggcaaacctatcagaattacacctgacttttccatggaaactctgaaagccagaaggtcctggatagatattctacccacactaagagaccatggatgccagcccagactactatacccagcaaagttttcaatcaatatagatggagaaaacaagatattccatgacaaaaccagattcaaagactacatatccaccaatccagccctacagaaagttctggaaggaaaactgcaacccaaggaagttaaccacaaccagaaaaatataggcaatagataaccccaccttaccaacagccaaaaggaaaaggggatagaatcccacacataatttctccaccatcaccaaatcaaaaacaaacaaggatgaacaatcaatggtcattaatatccatcaacattaatggtcttaactcacctataaaaagacacagattagcagaatggataagaagatagaatccttccttctgctgcatacaagaaacacacctcaacttcaaagacagacggacagtacctaaaaattaaaggttggggaaagattttccaatcaaatggacccaagaaacaagcaggggtagcaatcctaatatccaacaaattggactttaaaataaaatcaatcaaaagagatggaggaggtcacttcttattcatcacaggagaaatccatcaggatgaagtctcaattctgaacatttatgccccagatacaaaggcatccacatttgtaaaagaaacattactaaaactcaaatcacacataaaaccacacacacttatagtgggagacttcaacaccccactctcaccacttgataggaacaccagacagaaacttaacaaagaaacaaaggaactaatagcagttatgacacaattggacttaacagatatgtatagaacattccatccaaatacaaaacaatttaccttcatctcagtgccacattgaaccttctctaaaatcgaccacatacttggaaacatagcaaacctcaacaggtacaaaaaaaaattgaaataaccccactgtatcttgtcagaccaccatgctttaaagttaaaattcaacaacaacacaaattacagaaaacctacaaactcatggaaattaagtaacacccaattgcacaattcctgggtcaaggaagaaacaaaaaaagaaattaaagatttcctagaattcaatgataatgtggacacaacatatccaaacctatgggacactttgaaagcagtgctaagaggaaagttcatagtgctaagtgcccacatgaagaaacaggagaataatcacactagagaattaacagcacaactgaaagctttagaaaacaaagaagccaatacaccccagaggagcagatgccaggaaataatcaaattgagagctgaaatcaataaaatggaaactagaaaaacaatacaaagaatataacgaagagttggttcttcgagaaaatcaacaagatagacaaacctttatccaaccttaccaaacagcagagagtgaacatgcaaattaataaaatcgggaatgaaaagggggacataacaacagacacaaaggaaatccagagaatcatcaggtcatactttgaaaacctatattcctcaaagttcgaaaatctaaaggaaatggacaattttctgaacagatttcacttaccaaaattaaatgaagaacagataagcaacttaaatagacctataacccctaatgaaatagaaacagtcatcagaagtcttccaaccaaaaaaagcccagggccagatggcttcgtgcagaattctaccagaaattcaaggaacaggtaataccaattctcctcaaagtattccacacaatagaagcagaagggtcattgccaaactctttttatcaggcttcaataaccttgatacccaagccacacaaagacacaactaagaaagagaactacagaccaacatacctcatgaacattgacacaaaaaattctcaataaaatactggcaaattgaagccaagaacacatcagagaaatcatctaccatgatcaagtaggcttcatcccagggatgcaaggatggttcaacatatgaaaatccatcagtgtaatccaccatataaatggactgaggacaaaatcacatgatcatctcactagatgctgaaaaagcatttgacaaaatccaacaccccttcatgataaaggtcttggagaaatcagggatcagggataacaggaacatacctcaacataataaaagcaatatacaacaagccgacagccaacatccaattaaatggagagaacctcaatgcaattcctctaaaatcagggacaagacaaggctgtccactctccatacctcttcaatattgtccttgaagttctagctagagcaataagacaacaaaaggagatcaagggaatacaaatcggaaaggaagaactcaaactctcactatttgcagatgatatgatagtttacgtaagtgacccgaaaaactctaccagggaactcctacagctgataaacatcttcagcaaagtggcaggatacaagattaactcaaaaaaatctgtagccctactatatactgatgacacattggtggagaaagaaatcagagaaacatcaccctttacaattgccacaaacaacataaaataccttggggtaacactaaccaaaaaagtgaaagacctgtaccataagaattttgagtctctatagaaattaaagaagataccagaaaatggaaagatctcccatgctcttggataggtaggatcaacatagaaaacatggcaatcttgccaaaagcaatctacagattcaatgcaatcctcatcaaaatcccaacacaattcttcacagaccttgaaagaataattctcaactttatgtggagaaacaaaagacccaggatagccaaaacaaccctgtacaataaaggaacttctggaggcatcaccatgcctgacttcaagctctattacagagctatagtcctgaaaacagcttggtattggcacaaaaatagacaggtagaccaatggaatagagttgaaaaccctgatattaacccacacatatatgaacacctgatttttgacaaacaatccaaatatatatgctggaacaaagagaacaccttcaacaaatggtgctggcataactggatgtggacatgtagaagactacagatagacccaagcctatcaccatgcacaaaacttaaatcaaaatggatcaaagaccacaacataaacccagccacactgaacctattagaagacaaagtgggaaatacccttcaattaattggtacaggagactgcttcctgaacattacaccagtagcacagacactgagatcaacaattgataaatgggacctcctgaaactgagaagcttctataaggcaaaggacacagtcagcaagacaaaacagtagcccacagactgggaaaagatattcaccaaccccacatctgacagaggtttgatctccaaaatatacaaagaaatcaagaagctattctccaaaacaccgaacaatccaatttaaaagtgaggtacagaactaaatagacaattctcaatagaaaaatctaaaatggctgaaagacatataagaaagtgttcaacatccttagccatcagggaaatgaaaatcaaaacaactctgagataccatcttactcctgttagaatggctaaaatcaaaaacaccaatgacagtttatgctggagaggatgtggagaaaggggaacactcctccactgctggtgggagtgccaacttgtacagccactttggaaatcagtatggcaactcctcaagttaatgggaatcagtctaccacaagatccagcaattccactcttaggcatatacccaaaagaagcacattcatacaacaaggacatatgttcaatgatgttcatagcagcactatttgtaatagccagaaactggaagcagcctagatgccccccagccgaagaatggatagagaaaatgtggtacatttacacaatggagtactactcagtgggaaaaaaaaaaggcattttgaaatttgcaggaaaatggatggaactagaagaaaccattctgaggggggttacccagtcacaaaaagacaaacatgatatgtactcactcatatgcagattttagacatagaataaaggattaccagcctacaatccacactgccagagaagctagtaaacaaggaggaccctgagagagacatacatacatggtcccctggagaaggggaaagttgctcatgatcccctgagcaaattgagagcatggtaagaggggggaggaagctaggagaatgagaaggggagaagaggagggatgcagaggacatgagggagcagaaaggttaagttaggtgaagaatagaagaaaacaagaatggagataccataatagagggagacattttaggtttacagagaaatcaggcactagggaaatgtctagagatctacaaaaatggcagcagctaacaatctaagcaacagaggagaggctaccttaaatgcctcccctgataatgagattgatgactgtcttatatgccatcctatagccttcatccagtagctggtggaagtagaagccgacacccacaatttatcactgaactgacctggaatccagatgcagagaaggacgagtgaagagcaaaggggtccagaccaggctggtgaaacccacagaaacaactgacctgaacatgggggaactcttgctcccaagactgatagctgggataccagcatgggactgatccagaccccaggaacatggatttcattgagaaaacctcggaaatctacaggacctcctgtagtagttcagtacttatccctagcataggtgtggactttgggagcccatttcacatagaggctaagacacacaggggtgttcccaggccctatcccaaaggatatgatagactctgatgatgccctatggaaggcctcaccatccgggggaggagaaaggaaatgtgataggtagggttttaatggaggggggggggtggtaggggaggatgggagggagaagggaactgggattgacatgtaaaacaatcttgtttctaatacaaattttaaaaatctgaaaaaaaaaaagaatattgtatccagagctgagtgtggtgatgcacacctgtagtcccagtactggggaggtagaggcaggagctcaaggccagcctgggctaaaaaaactgaaaaaaaaaaaaaaaaaaaaaaaaaaactgtaaaaaaaatgctatatacagtatgaagcttgtgggttgggttttttcactcattatagtgcccttgagatcattcgcattagatcctatatcaacagtttgctctgctgagtggtattttgtgatatgaatatactagtttaatattaacctgctaaaggaggggttacttttgtttggttggttggtttggttttgttttttgggtttttttcaagacagggtttctctatgagatagggtttctctggttgtcctggaactcactctgtagatcgtagagatccatctgcctctgcctcctgaatgctgggattaaggcgagtgtcaccaccaccacccagctaagagattagtttttgaatggttcaagaaagctactgtgaaaatctttaccctgatttttacctggtgcaagttttccttcctctgggatgagtgcttgagtgttattaccatgttgtatgacaatttataaaaagctggtgcccccctttcccaccttgctgcctattcccccttcccaaaagtcagtgtgaatgatctgtgttctccttatccccaccagtgtttactaatggcacttccttgtttagttttggtcattctatcagtgtgtactgaagtctcttgttgaaacatcacctgagtttgtactccaggaaagcaaaggctgagaccaggagagaagcagctgaagagtgttagaaagagagctgaaaggggaaatgaaaaaaataccagtagctgataataggcctgtgggtgataatacagtgaagcttaaggctctgggatttcaggtgtgtgtttctcataataagcatttccatgagcctaaattctcattagtgcttcacccaaaaccattctgtagtcatcattgcacagacattctgtagtctacattgcccagggattattgctctgattttaatgtctgcactagactctaactgtaagaaaccaagtggctttggttccccatccacagcctgctggacagctcattcagtgtcaccttctgagggctaaggagagcaaaagttttcaatatagtgggccttacctatgccaggtgacaaaagcagattctagtaatagccaactcatgactcatgtcctgaaagggaaccaaagtcagttgtgtcgtttttacacgtttgttggatgttgtattgtattgctcatttgactggtgtgtgcaaatggctagtaagctgcagctgtgtggatgtctcattctcctcagtctcattctcctgagttagatgatgactaattctcccatttaagactgtctacatgttacaattgttcatgaaccttgcaagaggctgatgtttgtcccagtttttgccagttgctgcaggttagctgcagtgtgtgtgactgttggtaaagagtctcctgctgatagtaacagaagggacagatggtcaatgtgggatggtgacagggtaactgtaaaaaaaaaatgtattattctatgttgctcattcccaacttactaccgagcaaaagatacttcagtgtaagccagacacataattctcagtattttgcaaaatcagttatcccaattttggaagaaaaaagattctatcttcaatataacctatagataccaaagtattttaaaccacttaaaatccatagtatctactatgatttcttcaaatatatgtacaatacatgataatggacaataaagacatatttcccaggttcagctcacccatagactgcctcagttaacactgattgtggacttgctttgaattaggcagtactcgctcttagtggcagattttctctgtccttacatcaacactaagaaacaaacagcacaggctctttcttggcagatggaaactgcataggattacgcttcctgggtctgctgaactcacagggcctcattcccaggtccctctgagcccaaacccatgctcctccatcatctcccttaacctgtaggcatgatggagaaagacattgaaattaaaaccttatatcataacctaactagttatgaaagaatagaaggccactatgccaggtcctcaggctctgatgatgaggtgctagggtaggttctggaggaatcttggaaaggctttgccaaagtagacagtttggaacaagacaattggattttcacagcctacgtccacgagggagaaggggagtaatcggatagtggtaagtgatggatcacaaggaagataagtagtccaaacagctcattcttaaagctcaatgagaaacataatgaaggctgttgacacttgccaactcttgcaacatgtgtgattaggaaatcctacaaacattaaaataagacctctttctgagctgtgagattgttacagggaacagctggggactagatccatgacagtgactcctgggtgagcagccgttgaaaattctcattagttacagaaactgccgagttatgacagcactaatttttataaccctccctttcattcaaatggaaacaaaaatatctacagaaagagtagaaaagggaaactgagggttggggaccctgccaagcctgagaagtaacttccttgtcttaaagtcctagaccggaaatgtgtcctgatttctgtagttgttgccattgtcgtcttcatagtatttgtcactacttgtgattttaaatagcatgtcacagagaaattccagtgagactgaggtgggttcaaggccaacctggaccatgtagactctgttcaaaacaaccatatatatgatgatatatatgtgttgctgtacacatagaaatacatgtatgcaagtaaaacctatcttggatgatagttgattgtttctaaagtacagaatataattctgttacttcaagtttttaagtgaaaagaataacagaaagtcgcctttgtgctggtcagtactgcatagtccagagttctggatgaccatggtgccagcctataactaagctaaggatttaatatttaatccattctgattttctagctaaaattatatgtctgtattttctctttattacattagcaaagaacactctgagctttattgaggaaatttaattaaatgaaaaggacagcattccgctctaactggacttgcacgtacacacaatctagtgctatactctgaggggctgactttgcaagcaataacaggtcactgaattcatttttcctcaactcagttcatttcagggacagctatttgcataaaatctccaggataccatttttaattgacttattggattactacaaatattttgtagcagttagtaaccctttatttagtgactatatacagaccagttagggaaactacccaggggccttgatgaatctcccgatcagctccacattttggtgtttgttgtttggtctttggacaaagaatgaccagttgagaggagcagagtgtacaagccaggcttctgcttggcccactgtggtttctgtcccctgtttctgatctgtgttttcatagttcccatcagctgctgcggcagaggcaaactatctaaccaaatatcaaaatgcatttcttctaagcatctggaagaggaacctggaactttattttttgaaaaattctaacatacataaaaatgggcagaatgctacaattaatatacatatgtatgtatgtacatatatgtataagtacacatacatatttgtgtatatttatacatgtatgtatatatgtcccatgtccattttcaactcaaagcctatcttgcactcttttttcgttctttctttctttctttctttcgttctatacaatttgaagcacatccagccatcatatccttttattgatatgtgttttagtatgattctcctaatattaaggacccctttttaaattaaagaaaacaaggtcatgaatttgagaaagtacaagggagagagacatggaagggatttggtgaagggaagggaagagaagggggcatggtataattacattttaatttcaaaacataaaatacccaatacattatatcatacatttaaattcatattaaattttaaatgttatattaaaataattctaaccatcaaataggcagtatccaaatttctaattatttctgaatcctttttaattttatgtattacacaattcagcctccatcttagagccagtcccaaatgttcttgagtaattaaagggtccattcttaactgagcctatgacaggcttcccaaagagcaatgtaataggctctccagcctacaacccagcctcatttacagcaaaacaacctcccttttattggccctttagttgtgtgcacactaaacagtaaatggcagtgtttacaaatagcatcttagttttccctttgaacagagtacaaaatgcccataatgtaagtagctttgaaaacacagggagcttttatgtttgtttttctgacaacacagcatacaatcacagtaaatgttttcagggctggaatttttttttttttttgagtgctggtatttaaagcccagaagggtagtattagacatgctttgttgctgattttttttttatttatatgtagacatggaccaatatgaccaatgttcattccttccaccacaggaagcacagagtagaacaagcctttggtgagcctggcatcttcttttatgatatgaaaactataggtataacctgggctcgagctttgtagcacagagggacacataatgtgtttgggacttgagagagaacacttgttcccaacagtttgtactatagtaatatagttttcatggaattaccatatgagttaggatgtaaaactcccctctaagttaaaaaactgagaagtctgtagaagaagcagtatgaacaaaaacatgaggacttacaccttctgggaacccttgggagcaacttaggaatttaagtagccggctggtgtcaaacaaggagacatagactgcatccctgagagcaaaggcctttgatgtgaaattgagggtggccttgccagcaagcagcggcaggtcaggaggctttgagtagggatgtgacatgacctagcctggcaagggggtcactgaaccgatccgaaagggaagttggaatggaatgattagagaaggggaatgttttgataacaccagctgcaggactgggcagctaatgaaaggaaaggggtccttggagtctaaaatttacattgcagtgatttcaaataaaagagggaagccaggggaaagaattggtttgggacaaaacaagagtttagagttacagtgtggactgtttagaagcttcaaaatccccagaggccactgggagtatacaggctatagtttaggaatgagaacaagccaaaggtaacaattcaggaacttcctataggaaggtggtagctaaacctgacctctgagttgcacacacataatctagtgctgttctctgaggggctgacatagccaggtcatctttgtcatgtgtcccactgctctgctgctccaacccctttcaagtatcatggtctgttaccaagactgttgatgcactccccagtgtgtgttctggttatattcctgactttaaatggttctggagcgagaaggaagcatcgccctttaaagccttgccacatctgacctgattcgagtttcctgtagctctgacaatgagtcctgtgtcctttctcttggtgagggggtaaagcatgtctcagctagatggaaaggcacctgtgtttttatgatagcttgtgtttctaatagtaactgtacagatacagaacccaccagccacagtgacatgagacagactttccggaaacaagtatgcacctgtgtgatgaactcgagtggggttgtaggcattgctcactcttaaagcctgtgagtgttatgtgtctggcagataagtcagttcctttaatgaagtggcagggagaatatgaatacaaatgtttggtctataattaatgcaaatcccaaaaaaaaacatgattaaaagcccacagcttttaaagaaatcaggactgccccccccaaaaccatacccatgagcaggctggaatgcatctgtattttgttggatttttaatgaatttttttgttttcagaattggaactccatagatgtttgcttctagtgactggtatgtgtgttttctcaaactagtacaaggaatggcttgcaatgaaattatcgtaatgaatctagatagcaattaattgagtggttactttagatgaggaattttcctaagctcttcatcaggattaccatatttaattttcacaagcaccatatgtaataggcaatattgttcgaacaattttatggataaggatacccacctagggtcacagggcttatgctcttaaaccccaactctttatccaccaatgtctctaagaaaggaagccctagttttgataaatatgagcagaaaattcttcttctcatggcaatgatgaagtggttcttgggctatcccaagacatcatttctatatgggagagaagtagggctgaggctcttcctccttgtttctgtgtgaaggacagatagctgccatttctcttctgtatttctcttcagaggctgagccaatggcaccgtgacacaaagcagtcttgttttccatggtgtccattgcttttgtggaagggcaagactgaagtgacatgcctctgtggagaactgactgatggtgctgctgcttgagccctaggccagtgatcagcatcagcacccatctctccaacctctcctcccatgctgacgtcactcctacttcagttagttgcagggagctggttttgcatgactatcagatcatgcacagatctctggaaatataatttctatgtcccaggcctctcaaataatatgattctactctcaattattatgtctccactctaaaaatataactttagcatatcaaaagatgaagaatattcataaggctctgattcattcctaatgctatttaaaaatcagttgaagggcaaattctgtggaatgactgaaacttgtttacagcctgttatatgttcatcattaatggcaaagatgagtaggacccagggaccagcatatttcaaagattaaaagactatgcatgtcctacttcatgaagcctttctcacctaaccttcctgaagttgaatccacaagtattctccctcccatccaaccctctctcaaatagcatgagtatctgctctaagaacacttaggctcaaggaaaatgagaagcatgaacacttctgggattttgatcctacattggccaatgaccaattctgattaagagtgtgaatgacagagtcttcctcatggatctgtcactgatgtgctgcctctgactgaacaggttttcagttttgagcagctttttgtggaaaatggcaggtaatacaaccgtctgtggtctggacaactcacacacactggtagaaaagaagaatagtcacacaagaaaagatctcattttcaggcataactcctcaacaggcacttcctgtctaaggctggtccaggtgttccctgcactctaaaaaacgttctgagggatgatcacctagaccttgtgtctggtccctttcccttcgaagctctgctttctcttttgtctggctgcattgaaccatttttgattccttcgcctcccccctgtctaccaagtggataattaaccattaagtcctgttattcattgagatcacatatattaaaaagacctgctatagggggaacaattggcagcattgagagataggttttgaaaaacagtcatcactaaactcaagctccagttgtagagaatggaatccaggcaaaagctgaattcctgctggggtgtttgcacgcatgagactggatttctcggttcctgtgttgagtaagagtgtgaatgccagcgtccacctcatggatctgtcactgtttggcctgtgaccaaacaggttcctttaccttctgtctctatggttttcatctgtgtaacagagacagtggtaataccagctcataggcttggtgtgatggttgaatccaagggaggtacttggcacttggtatgtggaaagtattcaataaatgctctaagtgaatcagttgtggaaggaagagctgcttcctttagatttgcataaaaatttcattttcctaccgccatagcattacttcctgttagtagcctaataataactaagagggttttgtttgatgttttccctctcagtggacaagcgcaggtgtgccgtgtctgctgaccccaagctctaggattcacatgctctttgagttgactgaccttctgggtcttttccttcctcaggtgctggaaagcttcaagatcatggactacagccttttgctaggcatccacatcttagaccattcccaaaaagataaagaagaggaacccttacaaaatattcccgatgcaaagcggcctgggatgcagaaagtcctctactccacagccatggaatccatccagggtccaggcaagtctgcagatggcatcattgcagagaatccagacacgtaagtgtacctatcctggttttgggtaccccagtcaccgggtattcgcatgcaatcacctcccccaaaagatggcactctcggaatagatccctggttggcagtcaatggcttaaaccattatttctctttatctctagacaactagatgagtggcaatttctcaagtttctttcacccacatggtttctggttttagttcctttttattttattttattttttttaacaatgactgaaaacattttcccttcatttactactcattcaaaacatctaccagaagagagaagaatgaaccctgggcttgaataaatatgaatagatgcttattcatgttcatttatttacttaagaaaacacatggtaggaatgatacttcagagcttttaatctgcgtaaggggattctgttggtcttacctctgcaccctggcagatgtctctctcctcagccagatgtgttggtaactgtgggcttcatttgcatatgtaaagtgcacatttgacaatagaaaccattacaaccacggaaggttgttgaaatggttgactcatcacttgtgaacttgctgagcaaggagacagaggaaatcacttcccaaggccttcgtcacccaccttctaggattctccggcaatgactaagccaggtgcacatttgtctcttgtaaaggaaactaacacgtggtcagcctctgttcaaatacttgcttgcaattctgtctaaatagaaaataatccactgaacaaattattctatgtccttattgtaaaatgccacagagctattactcacatgggcattgctatgaggaaagattcctcattaacaaatataatgcttaggttacaaaactgctcaatccaataatctcttcagattaatacacacacacacacacacacacacacacacacacacacaccctgcaaaaacatctcaggagttaatttcataaatttcttctatgtgcttttctatgttttttgggggggtgattaattggttaggtttttttgagataggatctgtctattatgggctctggctctcttggaactcactctgtagatcaggctggcctcaaacatacagagatccacttgcctctgtcttctgaatactgggattaaaggtgtgctctaccacaacaggcctctgctggagtccagctccagatggagggaagggtctcaagatgggtgtatgcaacagaggtgacaggaggaatcagacatgggacacttcttagtttcattttaggagagaaggacagagaagcagcgcatcccctgtagacatataggtcccagctggggatgtaaggagtaggtgagggagggaaatgagccagaccatggtggtcgggaaaatcttgctacctgactgactagcagtaaatgggggatacattcatgttgttccaaaacatagatcatatcaattttggttttggacatgtgtttaacattttgtcttgttcatcttttagtcatcattaataaactatgacagaacagagttaccatttccaatcattttcccttaagttttgacatcattgttttctttcataaccatctttactcatcaaccccataacccaatttttaagaatctagaggcatatgactgcttgttttcaggctggtagcttttgtgggtacaaggacagtagaccaaaacaatcttcaagccattctgggcatactgccatgtcccaagcagtgtattattaactcttaatggtcagagtgcccaagatatatcctcaggccaaagctgctgcagttattattcaaattctggcataacacaatgtttaccttttatgtatttacagaatatttttatcatctttctacatcattctttgttcatcagtataagtctctgtgtaggacagaggtaacttcagcttatctaattttgttgttatatatgccacatagtcatccgagtgtagagtgagaagaagcttggattctgaactgtggccagctcctctagcccaccgaatcatgttgactttttagagtcactttgttttggatatcttgttcctgtgtaagtacaggggcagatgtttcaagagtgtctcatagcctcataaagaagccagaggtttctttatgagtatcacaacctgcaaggcataaggaagacctggaagaggggtagtgtgttcaggactttcctggagaggcttagaagcagtactcctgggagaaggcacaaatggttcataagaaattttccatcaacccaacattcctaaattgtacaaatattaaaagtctcccaagtatgcagcaggtaaagatgaaaaccaaaggtgacacgggagccatcatgtggctcagctttgctggattttgcctaacagctgtgctggccttatgacttttgccgttcccatcagatatggctgtgccaggcctctgtatttttcaacctcacagtaaacatataattctttagatcaggaaaaataatattactttagagcaagctgaccttgaactttctatgtagccaagaatggctttgaactcctaattctcctgcctctacctcttgtacctgcccctatgcttgtggttttatgcagcactggggatcaaacccaaggcttcgggcatgcatgacaggcactgttccatgctagtcttgcctttttaaaaaagcaatattttatactgctctaaaaaatccttctttgctcatattttttaaatagaagtggttttgtaattagattcttcccatccaactcctcagatttgacagctatgaagttattatctttaaactgatgaaaacttatggcaataaaggaagcagtagtctagaatccttaatgtttcagggtataattagtaatgaattgtagctttctgtactcatgttataaaatattttcccctttgctctatccacaggatgggaggcattccagctaaaagccataagggagagaaactgcttttattcatgggcattattgatatcctccaatcatataggtaagaaatttgggaaagtggtctttcattattttaaaagtaatcaaacctctttttttctggaaattcaccaaagagagccattttgctttctcaatgttattttctccatctgtttactttttagattaatgaagaagttagaacattcctggaaagcccttgtttatgacggggtgagtgacctgtgctttattaaactgtagacacttctagtctagctgtggctgtcactagactcaggggagagcaaaggtctttgcatgctcaagtcttaggctggaagagtggttccagtctgagaacaagaccacataaatttgaatagctgttcaaataaatgactttcatcccaacagccaggttcacaggcctagaaaataaaactgtggttgtttctatgtggggtgcaaaagtcccctttgggaggtggatgagcaaggtggaggagctttttcaaaggccatgagaagattgaagccctttaaatgaagtttctagaacattgggctaaagagggttttgagcccttactgtgattgcgaataaccctggatttgaaccagcttcctacttgactgtccacatgagaaagcaagtcagttttctcatgagtcagggtccagagcctgccttctgtgagtatgacaggggatagttcatgttagtgtgcagcacagtgtctaacacacgataataacataggaagtgaaaatgttgacatggaatgtatttacaaatgctgccaactttcttaaacgtttattttattagttttaattatgtgtgtatatgcatgcatgtgtgtatgtgtatgtcacctgagtgcccgtgccatggagttcagaagcatcagatctcccagagctggagttatagcacctacctgacacggatgctgggaacccatcttgggtcctctgcaagagcagtatgtgctcttaatctcacatgctgagtgacaggaaatcatcaggtgaagaaaacatcaactatggagggcaaactccctccttacttctcctcacacacatacacactcattgatgttagagtctagatttgatgcctccactctggcagaaccgaccctctcatggttaatgactgacggtgacatgtccacagagtccattggtcaaagacttgattgctcattcccctttaagacatgactggacaccttcttttagaagagaataaattatggaatctgttctcctcctttctggaaaggaatatgcatttttcaattctgtggcagattgttaataaccttccagcatgaaagaagtacatttagttcacaggctgacagctggcttccatcaagatgcaccattaaattataggctcacaaggctgtttctaagaatctgccacaggcttagtcagatcaggagttcctcttatgaaaaagtcaaggtaggttgattttaggtgtcccagctgaggaggacaggaatctcatggtgccttgaatgcagaaagtagatgccgaatatcccaaggtcattcagtgttttcagcgacacttattccattaccaagtcaggggcctagtcttgtgttgacaaagggtctcttcctttgtctgtcgaaaacatgtcttctaatctttagtcataagaaagatctctgtacttgttatacatctgtgaaaccataagtgataaccaagacttacttttgtttgtttacaaatgtgtttcttatttagacaggttttttatttttagataaaagataacaattatggaaggaaacctttaaggggaagggctggatgtcagtcagccatggattccccttgcttcttaccagtgtttctaagtcgtactatctgttgtgagaaactgtccacagagacagaagccattagtaccattggaaaagtacatgtcacaccagaaacaaatgtcagccacatctccagctccccaagggaacttagtgtttctaatgtgactgaagagtggtgcccttttaactgccatttgaggaactgcagatttgtggatcagtgtgttcatagataaaggaaccaaggccccaagactctggctgctcccagaatcatacagcctgttaaaattagacctcacaaccaggtgcaggtcacctgacttctggctcaccgctctttgaaccccactgcacaccattcgtggtgtctacacttgaacttttagaaatttccctgttgagatccagaaacctacattcaaaatagagcatctaccagatgaacatagacaatcagcctctctgcatccaggccattttctggattataagaaaatgacctgcactcctaaggattcctgcaaaacatgagaggagcctatcgcttcaattcaatccagtcctgtgtgatcagtgactagctcagtctcaccttgttacctagtgatgaacccccctaatttaaatgtcactcttatgcctgggatctctgtctgtttctgatctttaccatgtaactgagaactgtgttcttcttaactgccccttgcagatgttcctagctataaatgcagatacctcatattcactgcaagtgcccccttcattccagattgtgcctggattgctagtggtctgttagaaagaaaaacattcaagtccccccaagctctggtggtgttgtgacaagatggacaaattttgtttatggagcagagtcatttggctgtctcccctgtccctttatgctccattttgtcctaagcacatagattctctgtgatgactgtcttgctggctgccccagcccttgccttctggtccttctaattgttggccatgttttatttccaactctaagaggcaaacctgtcgtctttctttttttcaggacactgtttcagttcatagaccgagtttttatgcagatagatttttaaagtttatgaattccagagttttcaagaaaattcaaggtaagagcctcaggaaagcttctgggttgtagcacttgttactgacgtcaccatatatgtgtgggaagcttttgttggaagagttggatgtttttaccgaagtggtaataatgactaattgcagttaaatatcataatttaatgatgtcataatcattaacccattttatgttaaaaagaaaaagtacaggctggagtgtgggagatgctcagtcagtaaagtaaagtgaaaacctgagcaccctagttcacacccttagcacccatggaaaaagcagaacacggagccaggggtggtggtgcatgtctttaatcccagcactcaggaggcagaagcaagaggatctctgagttccaggccaccctagtctacagagtgagttccaggacagccagggctacacagagaatccctgtctcaaagaaaaaaaagcagaatacaatataatctctgcactagagaggcataaacaggtaatttgctccatgttcaatgggagaacctttctcaaaataaataaataagcaaattaggtggagaatggttgaggaagaaactcagcatcaaccttttggcctccacatgtgcacacacacacacacacacacacacacacacacacacacaatgtacagttagttgttgaaataatggatttatttgtatgtagccattggcacccatagtttaaagaagaaaccaaaaagaaaatagaaaaaaaaaaaaaaccttagtgacaaatggaagcatacacaccatccagcaacagtgacaaatacctaaataatcccagcacttgagaagctaagacaggagaactcagaatccccaggccagtctggggaatgcagtgagatgctctgtcaaaaagaaaaaaaggaaacgcatatgtcccacaagtggtgggaaactccaagggcagggctcaaggtcaaatctatagatgaaaaattcctgggtcaaaacttgaagaaagcccctgtaggtttagctccagcatgcacagcgtccccaggctgatcccagctctgtaaaaaaacacaagggagaaagttctcacatcagtatcctgccttcaaaccatgagtacttaaatgaatagaacaaactaagcccaaagttaataatgattattttgaatcaaggtaaaaatatagcatcttatttgtctttgtactcatgggaaatttactaagtgcatactgttggtgttcaaactgtgtggaaggtagagaataagcatatgatatgcatattgttatcttatcatttatttattctgtggtccaactgtataactcaaatcataatacattagtcacccccaaaccctgacattaggcatcataaatttttcttgcaatatttgctatagtttggaaatgcaaaagaaactgagataattactttgaaagccaataaaattgggaggaagctgcctagtactaagatgttatgtacctcctcttcatttttattttttttttttactttgtctaatttcttaaatctggtgttcaacaaagtgcaggactgctgtctgcaagctccgggtttgatgtcgtaccacgcacacccacgcccacgcccccacacacacacccaaagagcagtatggtggtgaatgcttttcggcttctaccctctgatgtttgcatatcattataatataaatagtatcttaaacccttgaatattctaaacatcatttaaaactgaaaggcagcatgaaaattctgagggtgtaccatcatctgctagccattctcttagtgttaagcgttcccatcctttctgcttctcctatttctagctaatatttttttatgaacgtagtttcaaataaatgctgtgtctaaattagggttgtttacttgggatacagttcaagctgtggaagtagggtattaaatgtacataactgcagagaccaaatgcagccctcagcctgcattatgccacccagataattagaaaaggaccacctggttgttttattttgtgtttttcaagtactgcttaggttcaagcattactcatggtttttcagccatttgtaattcctttgagaattgggctatgtaatatttgaccatttatgtacggtatttattatttttccagatgatttacatcaactaaatctatataaaccttcatctttttattctttttttttttcatcttattattccaaaaccagctttcatacacaatggatagtctcaatggtatctttaaaatgactgtcaaattgagacccaatataaattagatttttctgcccagggttttcctgaccataaagtagtgtttattcagattgcaagtctctgtggtcaggtttgtggctcatgttttcaaagattttctacttctcttccccttgagccaagatttctttgaagtgcttcacgaagttttaaaaggatgtggccctttattgcttcacatacacacccagttctggaagagggaagctcctcctgggaccttctcccctcggtagctattttttccccttagtgtagtaaagtataaactgatgccataatcaatggtttctttggttccaaaaagtacagcatgcagcatgtgttacagattttcccagtctctgacttaatgcagtaagtcttacttttttcttttcttttttttttttgttttttttttgttttgtttttgtttttcgagacagggtttctctgtgtagctttggagcctatcctggcactcgctctggagaccaggctggcctcgaactcacagagatccacctgcctctgcctcctgagtgctgggattaaaggcatgtgccatcaatgcccaactcttacttatttttaaaggattaatttgtttctgttttatgtgtatgcatgtttacctgcatgtacgcatgtgcaccgtgtgcatacagtacccacagaagccagaactcctggaaatggagttacagatagttgtgaaccatcttataggaactgagaaccaaacccaggtcctctgcaaaatcagcaaatgctcttgaccactgagctcactttacaggcccaaaacttcctttttaggtagtaaatctgttaactttctcccacttagagttattttttataactgtttttgctaagatatacattacatattgcaaaatgcacctcttcaaagtgtgcagttttgtggatttttgcatattcactgattcattcagtcatcatatctgtttcattttagaacatttttattaccacccattagcagtcaccgtagtcttcctcttcccagcactttattctgtctccattgcatggtgttaccaattcaggagacgtcatagaaacccacagtatatggtgtgtgtgagagacagagagacattttacatttaataaagttatgtttgtagtatcatatgttggaactttatttttctactgctgaataatattccattgtatatcacatattatttattctcagtcgatattcctgtcttcctgggtattctgaaaaacattgctgtgaacattcatgtgtgaggtttcgtatgagtgcacattttcatttctcttgtataggaacctaaaagtgaagtttctgggtcgaatgataactctgcaaacctttcccaagcactgcaccatttcactatcccactgacaacgtaggagggcctcgttctctctatctcctcaccagccgcttgctggttctctctcatctcagccgtcttggtgcatgtagggatgtaactcaccgtgctgttgatttgtggctctccaatggcaaatgatgctaaacaccacttcatttgttcactggccatttgcatattctttgggaaaatgtttactcagattcttggcccatttttagttcagttgcctgcctgtagctgaacttttaaaagttctttatctgttctggatacaagtgtgttatcagaaacatgatttacaaatgttccatgctgtaagttgtcatttgatatttttgctgacttgggtatagtcctattctttctttctcccacctcccaccaacacattcggtgtggtataaaaaacgtaccatctcaagccgggctttggtggcgcacacctttaaatcccagcacttggaggcagaggcaggtggatctctgggagttcgagaccagcctggtctccagagcgagtgccaggataggctccaaagctatacagagaaaacctgtcacgaaaaaagcaaaacaaaacaaaaaaaagtaccatctcacatttaggtctgtaactcatttttttttttttttaatttttagacatggtatgaggtaaggttcatcttctgttatttgtatttctgtttttcccatcacggtttgttgaaaagcctgcttttcctgtggtgaattactctggaactcttgttggaaatcaattaaccacagatgtaaggatttatttctaaaccctcattccatcttgttgatcagtatgcctgccttgatcccagccccacgcccttgtttttcagctgttagttttgcatttgaaaatcgtgagtcattcacctgctcttcctcagatcctccatgctaatctgggtcctcggtgtttccatgtgacttcagtaatcatcttgtcagctcatgttttcaaaaggaaagcagcatcttggcttttgttggttatgtggatcaatctggggatctctgccatcttaacaatatggtgtcttccattctgtgaacatagactgtccttttatttgggatttcattaatttctttcaacaaagttttgtgttttcggcatagaggtctcaattttgctcattatattcctaggtttagttggttgatacttggtttggggtcttattgttcttttttttttttcactttgttttttgatgctagagattgagcccagggcatcctcacacaagctaagcaagagatctgctactactgcatctccaggcccaagtagttcatttctatttttaaacttattttggtttagtgtgtacatatgtttgtgtgtggtgtatatttgtgcttgcaaatgcatatgcagatgtttatgaaaaactggaggccagaagcaggcgtcgtgtgtcttcctctattgctctccacctttacatacatacatacatacatacatacacatacatacacatacatacatacacacacacacatacatacacatacatacatacatacatactcactgaacccatagtcaccagcaggctatgagtactagagctctgaaggtaaggcttcatgcttgagccatcactaagtcactcctggacttcatttttgtaaatggaattattttcttcatccaattctctttcttcctacagaagatctcatcactaagtagtcagatccacatgacccggatttttcttttactttatgcaattttttaagagagggagcattcatttttccagggctgggaaatgaagttagggcctcttacactccaggcaagtcttctatcaccaagctactccctaaccctacttcctgcaaatctctgaaattcttttactagtacatgcggtactttttttgatgtatgaagtgagtcaggacctaactttgtttttcccaagtacttaacaacatgatgaaagttgcttctgtctatgcacagtgagcacctcatcatggttgcctggttcctagcagcagtatttccatgtgactttaataatattcaaagtcctgtcacagtaacaaaggtgataccctcctctgacattcagtaagctgatggactccaggtctggcctctttatcttaaaattttcacttattttatttgattcctttgggggatgtaagctcactctccagccccagcacctagggcaggaatggaatgcatcagaaaagggaggcaggatgccacacatggatgctgggtcttctcaatgtcttcagcaggtccctccagagagtcccttcacaccagggtgatttttacctatccatccttggccagcaccatgcctaggtcttcagtccactccttctcatgtaactgaaaacaaaccttcagtgctgcatccctcggcctctcctagagtgcctttctcctcttgagtgctgtttccttgtttcccgtcactctgcagtgcgctccagttggatgttgatcccaccagtccacttgaggtgggcaataagcattcctcaagctatttaacagcttttgatctgtagtgtgtgtgtgtgtgtgtgtgtgtgtgtgtgtgtgtgtgtgtgtgtgtgtctgaagtatctgggattattagctggagttctctgagaagtaactcttcactgtccttcatgactctggatcccagtgacctttcagactcttgtgctcctctttgatgacctgagatgtctctccaactgtgtcttaccattatatgtgcatgttctagatccaggccaggacttttgtctcttttttatacaattctccctggatgacttccccttaaccataacagacaaggtctgttatcttctgtgagcctaaggtctctttccacacctttgtcacattcccgttgcctctccaaccttcctacataagtgttccccctactccatggttgcttgagcccatcaagttcagaattgaatgtggttgccgctcagcacagagcctgcctctctttctgaaaccacatcccaccaccgaccaccaggccaacccagtgacctggcccgctaatgcttccatcacaccttgactgcacttcacatagctgctcaccgacacctgcagtcttgtgctaagaaacatcagggggccacttccatctttcatgaggccactgtgggctttagtttggatctttattaatttttgcataaaatataatcatagctctccacgcagatctgtttgcccccagttgtgtccctatacaacccactctctctaccatgcagccagaagaatgagtttggcatatagctctatccttgctaatttccagttaaaaactggtttacactaaaaataattatgatcataagtttgggagagggaaacttcttaggcttccaagttattgtttgatgagcatgagacgaatgggtggaatttttaccacctgccaccatttccaagagaagtaatttaattggtaaactttgcactttacaacaaaacaattagatgtttcatcagtgatggctccatgaagccctaacgcttaaggacatgtctttattgcgagtcaagaccctgttccccccagaaaagagaactggtcttcaatctttaagtagctttttcattcctgttttgttttgtttttactgtgggggattttgccttcttaaatgcactcatgcaccctattaggcaatttctacaaagtcctatattttctagaaatattagtcactgttgtgttaaaacttctctgaaattcttggctctgatcacctgctgtgactgataagttttctcatacactgctatgggtataccaagagaagtaacaggtcttctcaaaaagagttttagggaaaaaaagatgttcacataagtcacagtagcaaataagagaccccgtctcagactggagagatagctcagtggttaagagcactgactgatcttccagagaacctgggttcatggtacctcacaaccatctgtaattccagttccaggggacctgacacccatggcaaaacaccaatgcacataaaataaaaattaataaattttttaaaaagtgaaaggaccctgtctctattaaagtagaaggactgacacttggagttgtcctctgacctccacatgcatgctgtgcctgaactcatgcatatacaacacatatatatatatatacacacatacatacacacatacacacatatacatacacacacatacccacacacatacatacacacatatgcatacacacacatacatacacacacatatatatatacacatacatacacacacatatatacacacatacatacacacacatatatacacacatacatacacacatatacatacacacatatacatacacacacatacatacacacatatgcatacacacacatatatatacacacattcgtacacacacaaagatttcttaagtatgttaacataaatttacaatttttgaaaataaaaataattgtgatgatagttatggttcctaaaataagtattgagaaaggtagcatttctttgactattttaaattctgagtaactgtcttagtcgagactagttgaaatctggcatctgcttctaaatttggcccatgatgacagcatagttcattcaaactcccttcaccttcttgtagcaatagttcaacctcgaagctcatctgaggggtcaaggacccctagcagtccacaaaccataactcatagactctgacttaaacatccaaaaaaaaaaaaaaaaaaaaaagctttactttgaaatctaaagattctatagcaaagggcaggaatgtgtcacagtgtcacagtttataaaagattaacaaaagcagagggaaccttatagcagacaccagtggtggataatcacttgcattctgtaaaagtgaaacagtgccagggaaaacttcctcagtccacttacccagcattaaaatcaattgtgagcaaccaagaggaatggccaggttcacacacacacacacacacacacacacacacacacacacacacacacacacacacacacacctgaaccagaaaatggaatgctaaagagttagaaaatcaactatcaattagacaagtgaagacaacaagaaaggcctctggggttcggtctctagccctgtgactggaacaagcccagttttctgccttccatatccaggcctgtaaaagagccagcctcccttagacgttttgacaatttgatatatgcagtgtgagtgttggcctctggactaaagctgtagtccacaaacatcattaatcatgatgaagatattaacgtaaaactcgaggaggctaagcctttcccttcctggaagcagggagattgccctccctctattcttcctcatttgtgaatcccaaagtcattctccacctaatctcttgaaacctgtccacagagggaggactgatgagccatgtaatccaaactcaggggagtcccaaagctaaccacagtgactaatctagttgctgttggctcaccacttcaagcaaacctccaaagggcccttgccaataaataacaagttcaggggaagcataaacaggtctcagtttccctccctccctccaacttcctccaaggaaattcttctctagccatagtcagccaagaagagttactgtgggagagcatgaactaagtgatgacatcagactacagcttaagcagcagccgccagtgtgtcccctgtggaagcgcattttcactggcctgggttctcgccatgcccctgagattggagaatcccatttggatagaaatgggagtgaattatacatctgacaagactgaagagaaggaaatttcagtggaaaatcacaaagaaagaagcaaccagaagtaacttggctaaattgggcaacatgagtatacgattaagcactggcacatttataagtcccggtccccagttaataaagctggggtcgtgagaactctctgcactccaccatctgctcttaccagcttacccagcctcctcagcataagaaaaacaaggaggaggaagggcagttctttagcaaacaacaaaataaaatcgttgaaatttgcctcaaataagactatttcaaaatccaaagaaagtccatcttaaatgtattttacaatctttttctctaaatcaagccattttgaacaaataatacagccaaaaacacagatattttaatatttcttgccgtatatatgaaaagagcccttacccttctatacccaaattatttctaaaaatattaacaataaatagaatattaaatttagaaatctgaatctgattttgtaagttttatttattattttagttctgtggttgttttaaaacaggatctcactgtgtaactcaggccaatgctgggactgccaaggtgcctggctttatgataggatacactccactgtgcctggctttacaattattcttccttgctgtctagctctgaaggcctcaccttctaagaaacggtgcaactccattgccgcattgaaggcaacctcccaggagattgtgtcctctgttgctcaggaatggaaggatgagaagcgtgatttgttaactgaaggacagagtttcagcagcctggatgaagaaggtaaatgcttgcaacttcctaaaactaaaaagctgttggaaattctgtgagtaatgtaaagtcacaacagaaattggagaatgcatacttcaagagttagccaattcattaaatttcataggctacatggctattataatacaataaatttatataaatatgaaaccccatataaataatgcatgatatattatttatcttaaaaactagtaaatgttaaaatatttaaagaaaacacctataatctacctacttcgtgattaaaaaatgctaacacattggtattttttcctagattttattctgtgtgtacacatgcatatacacctatgtgctcacatacggaattgatgtaataaaccctttcaatttatttagagctgcttcagtgagtttaattaaatgttagaatttccttatttaatgtggatgtagatgtagtccttggataaacagagagagattgatgtggacattttgtacctttttaaagaactgtgtgttctggctgtttgatactactctgtagaccggtatctctttctctattgcttgctgcctagggctgctgatacaagtgatgaacagaaatggtggctctaggtagccctgccttgttctgattttaaagacaatatttctaatggttctttgtttaaaatgaaacttaccatattttgtaccagttgtcagaccaaggaacttctttcttgattctaatttgccaaaaggtttttaaccaaagaagagtaccaagttttattaaactttctctgtctactgaggtgatcatttgaattttccattttgatccaataaggggaaataatgttttacacatttctgtcgattgtttcttggttttttggttaatagcaaatatagacttttttttaatcattatgttctttggagactctccaaagtgtcttctacttcctatagaagatttaagacttcttataggcaacttccttccctcagagtcttcagattgctatttcttttctcttctttctcagcatttatctccttatgaaaattgaatttctttatcatattctcatgtcagggagagttaatgatttgcctatggtggttaatattgtcaacgtggcaggatctagagtcacctaagagacaaacctccaggcgttcctgtaaagaattgtctagattagtttaacttctgggcatatctgggagagagtgtcttgattaggttaactgaggtggaaaggacccaccctaaaactgggtgccaccattccctgggctttcatcctcaactacacaacagggagaaagccagctaagcataaacgtccatccctgtctgcttcatgactgaagatgactaggaccagccaccttaagctcccgcagctatgacttgcccaccatggtggactttgccctggaactgtgaactgaaatataacccttcctttcttgggttgcctttatcaggttattttgttacaacagtagggcaggtaaccaggacattgcccttggtcctctctgtattgacagcagttcctggtagttagtacccacctcctttaagctggcatcccttggcctctcccccagcaggctgcctgatttctgagaacacacagaaaattataaatgtccacaatttgaaaaacaggaccaaatttatttttcttaagtaattctcattttaacagacacttttcattttgtttttgtgttttaaattgaaaccttgttcagtttctagtctggcctcgaactcccaatctctttggcttcccagtagctatagtaaaattaaatatcactatacccagaatgcctggaaacaggaagtaatacacctgttcagcatttcctgtccctgctccactttccctccaggcctgtccctctacctcatcaaatatactccttcaaaaatataatccgaaattcaggggctggaattacattggtggtggcacacttgcctaggatgtgtagggagggccctatattaggcccaaattactatcccccctaccccctaaaaaaactcaaactcatctaacaatgcctaatgtggccatttcccatttacacggtgaaaatatatcatctatgaccctttgtgtgtatcaagcaatgtcagaaacaccccaaggctgtgctgtattcattaacatgttttcagctcagtttgggaaaagataaagaactcatgtaagccagatatggtggcaattgcctttaatcccaacacttgggaggcagaagcaggcagatctctgtgagtttgagatcagtctggtctatatagcaagttatatataggtctatataacaacccaggacagccagggttgtacagtaagactctgtgtggagcaactgtgcactgcaggtccctgctgagcctgaagggttcatccttcctgaccttggagggccctgacataaatacttttcttgaactcctaaaaagaaataggagtttctcacttttttaaaggcagccttgctattaaaacaggatgttaaaaagagccctgagtcatgtccatcagtccgtgtaggctacaatgggattgagatgctgcaggctgctgttctgctaaagggtttgtttgtgtcccttgaagtctgcctctcacgtggagagtgaagcccgacttctctgttcatgcctctgccagttgtccttttaatctctgccacattacctccttaaactcctaggagtttttatgccatcattttgaaagattaaatcactttattaggtttttaaaagagcatccctaatgtcatttccataagccattttgtaaattaatgtcatttccttgctgtttaacctgtttgcaagcagatattttacatttctgttgtagttcaggagagcacagttaattcataatttcatttgcagcctgatacataaaatgaatgcttttgactcatgtaagttattgcagatctaaagtagcatgtattgctgagattcatgagtgcatgcgtttgctttcactcccccagccctgggatcccgacataggcccgacctggtgcccagcactccatcattatttgaagctgcttccttagcgaccacaatctcatcatcttccttatatgtcagtgaacactgtccacatgacaggactacgctttattcaaacaggtaacattcagttcagttccaccagcttgccaatcaggctattcttctctcaaccctgggccaaaagcagtaccgttgagattgtgtttctgcctcatggataggagaaagggcttgccttgtttttactgttacaaaaatacacttaaagaaaaacccttccgtttccctttgccattaattattacgttttgtagaaatgagttcttaacagttacacgctggactccatgcaaagaagacaaagttttcatcatgtttattttagtgagtgagtgtgcttgtgtacatgtgctcatgtggccattcccatgcatgaatgtgggtatgcatgtgccagtcagtgtaccagtggagctcaaagggcagcctcatgtgtccgtcatcaccttccaccttttttttggcagggtctctgcttccctgctgcataagcaaggctggcccatgagctgccaggagtctcctgtctgcctccaagattatgggaatagagatgctcatgctgtgtgtcagcttttatgcaggtctggggattcaaactggggtcctcacattcattatttatatagcaagtacttttgacccactgatctatcttcatggccttttacttttctcccctccccgcaccgccttttttgagacaagggttcatgtaacacaagctagccctgaattcatgttcaaagtgtgtgtcatcatacccaatcgaacccatcagtaatttcatatatatacatacgtatgtatgtatgtatgtatgtatgtatgtatgtatgtatgtatgtatgcatgtttttgatacagggtttctctgtagctttagaacctgttctggagctccctctgtaaaccatgctgccctcaaactcaaggagatctgcctgcctctgcctcccgagtgctgggattaaagacgtgcgccaccactgcctagctaatttcttacattttttttatttactggtggtgctaggggttgaatccagagccttgggagtgcttgtcaagcgctcagccactgtcctacatcttaaatgccctctcttcgtacttactactcatatagctacaaagaagttgcatgcactgttttgtacatacgaccttaatgactatggtaaaaacggtggtattaatggctctcagaactgccacttctgtcaataccgagttcagcgtgatcttcagcaagcaaaagtttggtggttaaatctgcttatcagttgtattttcttaccccgcctgttagacccccgaaaactcaagtatccggggtcccaggccacgttcgcggtcaccccaatcaccaggcggattcaagagcttgctgcaaactgcacgaggctttattgtaatttaatgagctaaccccatgttagctcgggtctttcacccacccgccatggcggatgccagaaaagacagctcctaggggctcccaaaagatcttatagggcagcgtaaggggagtgtctaggggtatgcacaggctcacgattggtgtgcctccagccttggagggcttgccctgtgttgattggtcaactggttgttatggcccataggccctcccagggtggttgctatgctctctacgtcattgctgtgcgcttgtctgtaaagcacacccagggtcgtaaagcatagcgccaccagctaaattctgattggctccttgtcacgagacaggcatctgactttctagtgtctgggacaaggtcatagaagcacatgttcgaccattatggctgccgaaagggaagctggttccttcacgcctttctctcttggctacttagaaagtagatgcaggggtagcaagtgaggcaaacactagcactggagaagcagatcaagtgcgagccagcaaggcatggtgtggactgtttcacctgcagaaccatcagtcacttcaactacataaagggcatttgatttggccagctctcttggcctgaagaaatttaaaataacacatattagcctaatctgaatatggaccgtgaatgttcaaatttggtttctctattagtcagtcctctctgtgtatggtgtggcagaatgcacgggttgtaccccatgattgtaagcagcagttgagagggaagaaggaaggtccaagggaggtctcagcaaggctaagaacaactctcataggatgctatggtgcttttttatggtgtgctactgtggccattatcaggaacatataattcaatgtgctcctgaattgtttactgacatttccagctctaagaaacattgtttggcaaaggagtttcatttttttgtttgttggtgttgtcactgctgttgtttggtgtcagaagggttcttaaatgccctgtctcttggtgagaggtatttaagtcctgggcatttgcacagtttcttcgggtctcctcctcctgaaatcagtctttgtggccagctggaagctagctacctctccgggctctttttgatgctgcattgttttagcagttttctctgacactgttgccactgccttgttgcaatttggtatcttgacacttagctatcagacagggttcagttgcaagaacaaaaaagtattccatccaaagcagaaggaagctggttgcttacctagtgtgtgggaagcctggtaggccttggtcagtcttggtcactccactgaacccaccctcctacagcactgaactctggttggtactcaccaggtgttctcccagggccgactgaggaagcatttagggatcccaggatgtccttaaaaacaggccaacaaggaagctcaagcagcttcactcttcctggaatttctcagctagtgaggagagctccaggacgcttcaggaaccaccctctgcttcatttccttgctgtcaccttcctgctccctcccacaggtgtttctgctattagccttgatgtgtaggaaaagccagaagatcctccacagtcttagcttttgcttagggaaaccctagggagctaagattcagagatgctaaaatcttgaagagaaataatggcccaagaacccctgggattgaacattcctggatgcctgtcctgcttattcagcacgggaacctcaccaacaaactaaagacatgttcatatcatggttccgtcactttctttagtgtttgttgtacatgatatttcttgaggtaataagttgacgtagtcctaagtctcatctggcccactgaattttaaaaccagatacagacagcctgagaaagtacatcaaatactggcattgcaatttacatctgagatttttctgttattccatgaatcatatttctcttccaagtggccggctttctcattttaacattatgttatccttatctcaggtaacagctgtcattcttgtcattctcagtctctatagagcccttaactttaacgcattgaatagcacctaggaaagtccacacctaaattatatagtgcagtgggaaacagctgtctctagaattgttttatttttaaaggatcattgtttgtgacatttaaagccacactgttacttagaatccattctggtttaagtatactctcgaaattgactaggaagcaaagaaaaaagttagggtgaccttaaaagtatatatttaactgactgagcatacagtctctctctctctctctctctctctctctctctctctctctctctctctgtgtgtgtgtgtgtgtgtgtgtgtgtgtgtgcgcgcgtgtgcgtgtgcgtgtgcgtgtgtgtatgtgtgtgtgtgtgtgtgtgttcatgtgaatgggtatgcacaggtatgtgtggaagtcagattccagtagctagcagtcttgctttctgagacagggattggcctgtcttttcctcccctgtgcttaggttacagacttgtgctgccctcacctggatttttacatggtgctagggatctgaactcaagtcttcatgcttgcctagcaagtactttaccaactgaggcttctccccgcctccaggagtccttatttaaaggctctactgcatgatctcaggttagagtgtacagcccacaggaacaaagttacatgccatcatcaacctgcttcacaaacaaatggtggctatgtaagttctgaatttctgatacttgaatttttctttcctactaagaaatctgttctttaaaggaggcataaattgagctctgagaactagagaggcaaatagtttttaatctcaaaactaagagtaattcagctcaatgttgtggaatatgttgcccacatgaatattcattcactccatgatttcctgcacagttgggagcggagctgtgactctgattatgcatacagattgaaagctcacttcatccaattgcatctgtgtgcttacatcccagaggcccttgccagcatcaccttggtagccagtcacatattttgctcatgttttactagtggctatttctaatagcttgtccgctgaagagacatggggttttatgagaacagcagataccataggagaagcaactggccatttctacatgggagaccatctggcagaaccttcataactaatgagtccagcatctagatctcaggctgacccagaagatgtgacagcaatgctgagctcttcttcctgcctgagcactgtgaagctgggagcggatgagctgattcgtgtagccacatagctcctctaccaaattgcataccactcagattaaagccatggaaggacagccatactacagtaggtgagagacccttctttagaataggtcaagaaatggctgtgcagactctggtggcatgtgtaagtctgctacgagtccagttggagctcaggtctctggggtctagacctcctattctttccctacaccatccttgcatcaagacctacaaaggcttttggtcttcttattgtgtgctgtaggcaacgttggttgactgccttttttcccttacatcaattcttcatgccctgtatttatgctatcttcttttgctacataataactaaaaaaaaaaaaaaatggtaatagacaaagtgacaagttcacgttactgccaccctaatctacttgtgttctagtggtcattggctacttttctcactaaaaatgttgctctggccatctttctatcataataccagccatgtttcaactcatcaataattatataacaaaacttaaaagtatgtcatattaatttgaattcacaagaatactgtcgtggcacttttatttccgccttcctgggtggacttggaactgctgctctacccattgagaagtgactcttggtgggaaagtttccacttgatttacaaagacttgcatctgttctcaatggaagcagaattcaggggaacctttactaggtcaaatatgactgagagaggttgctaaaatgtgctagcattccagatctttccttcaccctgttacaggcagaacatactactgtgtttctatggttgctgcacctacctgctgggcctggaccccagtccaggactattcagcccccatggctgatatcctttggattttaaattttcagtctgttgtctccagactcttggcttttctgtttcttcctctgtatcttcagccttgcagacagtctggcttactcccttgcctcaagtatttctcttactttttcatcataataaatcaccatttagaacttcagccctcaaactgtcactctggccacgtaacactgggcaagctgatttagtttcggtgtggcaccatttccgaatctgtaagaggttcccatttgtgtttgtttgtttgtttgtttgtttgtttgggatccccatttgtaataagtgaattgtttataataagtgaataccctgacccaaaaaaattgctgtaaagagtaacggaaataatgatcaaaaagcaattgtaatgcctcctggagcatgccaccatcaaaccatttgtaaacataaataaccaagctcttcaaggcttgaacacctcacagcttcctcctgagttctactgcaagaggcagcatgtcattgtttttggcagaaagccttgggtggtactttaccaccactcagaggccagtcaagaaaagagaacatccccttggaattttaaagggagaagtggcagaaccccaaggaatccccataggaagcagctcccacagtgcctcctgctacctgggacctatagctgactttcaagcagggcagtggaagatgacaccagctaaaagatctgagacagtggcaggaacacagccaatactacagtcactgcacaaataaggaaggagaaaaatgagggtgaagggagccaggtgctcctgtcctcacctcctcattggtgttctgccatatctcaactgacaggacctgctgaaggaaactgtccgatactgtttgccctagcatagaggccccagggttgcaaagtacagtgcagaccagatacagatagtgaaacaaaaaccaggtttgtgtaacatcttttttaaaaaagaaggaagatgggaaagggatgaggagagaatttcaaggatcaaggcttcgcaaaggagagtgcacacaagaacaggaatccgcttcaactcctataaaacgaatcacagagcctatttattagcatgccgatgtaatagtactatgtaaagtggctgcaatttttctaatgatctgtgtaattagagactgcagtatttaccaaagtgtctggctttcccaggtgctgcgctagagtgaatgctggttataaatatcctcttggctaatttcaggcacatggaatagacagagcagttttttagctcaagaatccaacagacagatctgatgaggcctgaagaacccaggtgaggctgcagacacactgtggagggagaagagctatctctggcttctgaagttaccaccctaacctatcccttcaactgttattcagcctggagcaagaactcctgagcaaggaaattcaatgtccctaatagcttatgagaaagtagatcaccaaacagaagtttgcatccccaaggatcctgaagcaaagacttcccccaaaaaatctcctgttagggagaggccatgctggggttaccagggtctctgaagggggcgtcacacatcactcctgttgtatccatgacatgcagagcacatcacaccctgacagaaacttcacaatgtgcctgtcagttttgcttgtcctctgccctcagaaagctaagggaggaccatggatttccatcacgtcttctgcacctggattttaccagatggctgcttttttttttttcttttttcttttttatgaactatagaactgcttctgaagtgattgacttttcaaatgatccttcacagatttctgcatgggcaggaaattgaaatgaatttttcagatgcatgacattttatgagtaattgagggctcagaggtaatttttgtgagtacttctcttttttttaagggattgatgcatggtattatttctaggtacctttcatataatagtaagattcttttcatgggtccaatttattgataagccatattgccaaaaaggaagtggtgtgggtggtgactgctagccagacagtagatatcctaattacacacacacacacacacacacacacacacacgcacgcacgcacgcacgcacgcacgcacacacacacacacacacacacacacacacacacacacgggtgtaatgatttcactacacccgagataaatgataaatgggtgttttattggggaacaacttacacagaacaataaagaaccactgcagcatttctctgcccttctgatcagatccgggacccaaaagagagagactgaaagagagagaccatacctcacactttcttctttctgcttctgaccgcacctgaagccacacccaaaggagtgtggccactcatgtaggttcacaggaaaaatgccactacagagagtggggggagggagggaaagggatggtgagagagagagcgagcttggggatagagagatggagatggatcagtggttaagagtacctatcactcttgcagaggactcaggttcagttcccagacaatttcagctccaggacctggcactcttgacctctctgggtacctaaactcacatgcacacacacacagagagacatccacatacagataattaaaaataatgccttcttgccagatatggtgacatataccttaaattccaacacttgggaggcaaagataggtggatctctttgagttccagacaagcttggtccacataggcagatccaggccatccagggctatatagtgaaacattgtctttaaaaaaataataataaatcaagctttgttttcattctctgtatttcaaatctcagcactaagaaactacatccttactgcggttgaggcaggccaatctctgagagttgaaggacagcctgctctacacagtaagttccaggctggctgaccctgactcacaaaacaaaaacaaacaaacaaaaattgcattcttattttccttgacttcaagggaaatgtgtcacagtggcatgtctctgtcagctctccaattgtctagcctccttaactggacttttagaggaatgcttctctttgtgagtaggttctgcattccagggacctgcctgtccaagcagggtcctccagggcttcttatacacagaagagttcggggaggggaggaccatatgactgagggtaacagtgttgtagctgaggcacttctgggagttaatgcctgatggtgatgcattatctgaaatacaaaacagcaaaattccggtgttttcagattatattaagaataggactctggtgcctttcttgatttatttgcaaagatactaagtgaaagtacctttgactctggccaataccaaatttgtgtaccagctcaggcctttggacctgaggccaaaatgcctttctgttccccatctgttcttgtcctccctgtacctaaagtccttggttatagctcaaccgagaatctgtaaaccccttgaactgaactgcctcttttgttatgtgtgagggtcaccttgggccttctcagcccttagaaatcccccctctctgggctggagagatggctcagaggttaagagcagtggctgttcttccagaggtcctgagttcaattcccagcagccacatgtcactcacaaccatctgttatgagatctggtgccctcttctggtgtgcagatatacatggaagcacaatgttgtgtacataataaataaataaaatctttttttaaaaaattacctctaaaaaagaagaaaacaaaggaagcacccctctcaccaggcggtgatggcacacacaccatctctctgagttcaaggccagcctggtctacagagcaagttccaggacagtcagtactacacagagaaaccctgtctcaaaaaaaccaaaaaggaaaagaagaaagaactccccttggaagccatcagtttggttggtccacctgagagtaactggcttgatcatttgctgaagttgaatgtttgggtgttaacttcctaccctggacaattcctgatcaagtggtctttcagaggccagccctagtcaagataatctgtcaatccagatgccctcactaccttagcatctctttaacgtagttcccactggcccacctatcatattcccttagtgaagtccttgtgtcccctgtaaattagtggtgagagtctgagcctgctcttcatggtgggtaaacttcaggcttgtgttagcagtccggtcgcttcccctccatccagggccttcctgtgcaagatgttgcctgaagcctgggcctaacttcatttttctcacaaatatagaggaaaaggagccaacatcctgtctcccaatgcaagaataaagtagatccatttcctgtttagtcttactgctatctatggggtgagctccacagtgtctcctttatttcactggaatggaaggatttttacagtcaaagccaccatggaagcctgctacccagagtcactaacttcaatgagatggccatgactggcccctggaggccaagtgcatccaccatccctgcctgcctttagcttttatttatgagagttaaagtgttagaataggaggtaatgacagactcctagtttcagagtaatagtagccaaaatgcaattattaattgtctgctttctgcaataaggaaagatgaaatatatgatgatacatgtgaaagatagtgtttggagtgacacaaaagagttaaaaacagccagacttatttattcaataactggtttggctaaaatggaagtgtctgccctggttgctacttgggaagatgttgacatttctcttttctttttctcatcaaatgttaaggatgtttctgagtctttaagcacttaatctgcaaggagttgttttttattatacacacaacttgctgttattggatgttgtctgtcttgctaatgagtgggcaggagagtgggcagcattccagggtatagcatgagttctaataggacttaatagtaaaaacccagttagatattagggtaaatgatccagccacaagagagatctcttacctctactgaatcttcagaccaaaggggacatcctctccctatgaatcctaatactgaacacaataagctcctgtctccacctgtctctgcctccctagtgctgtgattaaaggtgtgagcctcccaagtactgggattaaaggtgtaagccaccaccacttggctctatttctcttttagactgggtcaatcctgtataccccaaggtagtcttgaactcacagagacccacatgccttttgggattaaaggcgtgtgccagcactgcctggtgttcatggctaactagtatgattatccctgcactctgatcttcaggattgatccagtctaaccctaaccttgagaatcttgttgtgactttgcaaatatcatattacataaacatgagttgctacctgagagggactggaattccaggaccttcttcagatgccaaaatcggtgggtgctctttgctttactctttgtgaacctgaagctctctacattgtttttattgttgttcatgtcattggcctatagaagtttccccagagcctctgatgtgttctggtctgtactagggtcattacttggaggcgtttctccacccttctgcataccctagtcaactcttgtctgcactggctccctgctggctcctgctttctctgtttagcctctacgttctttctatggatgccatctctgcttcccctccagtgtgtcaggatttcctgaggtgatacctctgtgttggcttgttgtcacttgatgtgcagaaccgtcagaggccctctttagtctgcatggttttagagtgggagaaggggagtccctaatttttttctctgcagtttctcttatgtgtataggaatcttctagatttatcttccagtatctccaatgtctgagatattgactcagcttctaatcattccgctgaggttttaatttccattcccatgtcttctaagaattcttttttgttctctgaggttccatgttgtaggaaccatgccttcatggttgttttttgtttgtttgtttgtttgtttgttttgttttttgtttgattgttttttctcttttctccctggagataatagaatgaatgccatagaagaaagactgcatatccctgatagcacccttccatatcaaatacctaaatacattcgaggtgcttaggcttgggtgaattaagacaagacccccacaatgaaaaaaaatcacctcacaaacaggaagacatgtatttgccacttgcctctgtcaatgcttgtaactgatgtggcttttcccagcgtacttcatcccaggacctgagaggtagaacagtccccatcttgctaggttgtcattctttgcatgtactatgctgtaattgagacagtttttaaaattcatgtccttgcctccatgaccagaagtggttcataataaacaaggaattctgagaaaggctctctcagtgggaactatgacaagcagggagtggtgtattttgttgaaaagcgcacagccctgatgtaacttgagccaggcacttccctgccaacacgggaaagtcggctgcagattgaaatcattccatgactgagggatactgtgagcttcctatttctgcagcatttattaagtaaggtttagaaagtcactatatattgatatggaagctaaacttccaacctgtcaggtttgattaccagtaagtaatgttcaattttcacattctggtttaaggtaatcctgaaacacgtgtattagacgcctagtgtataccacatactctgtaaggtgtgcattctggaggtagcaaaggaatcttctggaaacatacatgataggaacagaaaaaaaaaaatcagttcttaccaagcatgtatacctaaacctaacaccatataagaaacatttgtcacgggaaatgaactcacacagactgatgaaacctttatcctctcaatctataattatgcaatcactataaaaaaaatactctcaaaggtatccacttggaagtatctctgttttaatctcatgaggtgtgatcaacatccatccaaaagtgccccaaaggttgacaaaaatgaagatgaattcagtagctaggagtgcagccagtgggaagtagtgggatctggactcgggccaggctggctgcacagctgtgtggggcagaggttttaggagacatttgatgaatggaatcgtcacttgtaccacatagcagaggccagcccgttacaaaggctttcagccaagcagcaggaaagtatggcttaaactggatatccccatggtaaggcatgctggccagccacaggagattaccctagaagtccagggtaattcaccgatggtgttggtagtcactgtctatattccccaaagggtagaacaaacagtatgtccagtgattgtcgtgacacttaatgacacagtgggagatagtggcttaatttatattagtcacttacttaacaaagtctggagacagggggacagcccggtgacatctgcaaagatccaagctgtttccattgttctgttctgctatccttcgaattttgatttttttttcctattctactgccctacagtcacaagatggctgccatagtttcagacattatgtcctcattccatgaactactgaaggaagaaaatggagccaaggaaaaagagggtgtgaggcttaatgagagaatgagaccaccagagccatgttgagaacaaaaggcaaagttttgtattttaggcatgaactgctgggctgcctcctagagaaaagagagcagccccaacaaaaggagagtttgggttttctagggtggttttagttggccaggaaagtgtctggagagcattaggggaaagagaactgctgcaagccaaagttactattataagcaaaatctatatgaggggatatctggtcattaagatatcagggtgtgggctggagagatgactcgggggttaagagtacttactgttcttgcagaggacctgggttcatttcccagaatctacaaggtgactcacaaccatatgcaaacccagctgcagaggatccaacaccctcttctatctctgtgggagctgaacacagatagtacacagatgtacatgcaggcaaagcatttatacatgtaaaaataataaataattttttaaaaattttatttattatatatacaatgttctgcctgcatgtatgcctgcaggccggaagagggcaccagatctcattatggatggttgtaagccaccatgtgattgctgggaattgaactcaggacctctggaagagcagtcagtgctcttaacctctgagccatctctccagccccctaaataattttttttaaagataacaggatgctgtggtaagactgttctgctaagataagggttgggtggcttctgaaaagtacaatacattccatttcccaaagggactggttcccacaagggttgtccatcttggtgccttaggcaactttgccttgggctgggctaacaggggattgggacctctcattgaaaagtatctgcttctttatggagaggggttgtctagttgcacctttaacagcaaattatcagattcagaactgtatcacatgaccatcagtagctgcgagggaggcttgaaaaaattgctacctgccctaagactgtcttagaagaggaagaaaattttttcttctgctgctactaggttcacagttgaggcccctataataagatagattaatgaaggaaagcatacagattgatttagtagagcttcttgtgacagagaagccttcttaggtgaatccccaaaagcacggggacacctgtgcatttttttttttttttatgctttttgacaagtagaccagggtccacagtttcctctggacaaaggcagtgcaatcctgtagtgataaaccacagggagctagcaagcctgctgctgggattcttctctgtgttcttgtgtctcagaggtactagcaattcttctcccttctctaaaacctttctcaaaataaactgagggaggacttgcttctggggtttgggcaagaggaggtcagagagtatatagccttcctacttttatgaccttgtgttttctgaaatgacagtaccatgttttagagcaatacatctgaatcttccattgcagcaaagtcagagctctgcctattgagcagcaaacagttccaaaaaggaaggtgaaaagacccaggatgttgggggtggtagttgctgttgttgattgaaacagtgcctcactctgtagaccaagctggcctctaactaacagagattgccttcctcttcctcccaagtactaggatctttgtttttgttttgttttattgaagcaggctttgtgctcatgtttagactactccagctacaacactgcccatgagtctctgcccctcagaccagaggcctactgtgtaaagacattttgatactgtgtaacctatacatcaggatattttgtagatattggagacattttaattttatcagaattaattttaattgagggttatccaagcaacatttagtatttttataactttgaatcatactaataggcatgagtattttgcccttttccctttaatcaatagtttactgggatattaatagtgtgtgcaacgtgtgtgtgtgtgtgtgtgtgtgtgtgtgtgtgtgtgtgtgtgtgtgtgtgtgtgttgtgtgtacacatgcacatatttgcatgtggaaaccagagggcaacctcagataccattcttccttaggtaccacattcatcttcttttgtgagacagggtacctcacaggatcctgaagctcaccaattagcctagactggccagccagacaggacccggggtcttatgtctctgcatccccagtgctgggattataatggtgcactgtgggttctgtgaaccaaactcagtccccacgcctgtgtggcagacactttaccaactaagcaatttctgcagcccaggacataaatattgtatttctttcaataaaatgggctcttggcatgtttgtgcaatgtctcaagaattggcacgcaaagccaattgtgttgcattttataaacattaaactgaaagttgccataactcaagtgtctcacactacaaattttaaaagataaaggggtttttggttcaagtaatattgactttggagatttaaagtgaccttccaagatttatttttttcctcaacccagaactgatagcaaaacaaagtattatttttatcgagttgctgtgactacagaaaaactgtatggccctgaggggagaaacaaaacacagtcattagcttgatcgattaataatccttaggaagtttaattatagtcatctcagtatcagcttggtgaaaaaaaaaaaatggaaagaaaatgccatcacacagaatattccctagatatactggaaaggagtaggttctcttaatagaaataactgtaaaccgacttaatataagaactaaagctagggagctggagagataatggctcagaggttaagagccctggctgctcttccagagatcctgaattcccagcaaccacatggtgactcgcaaccatctacaatgagatccaatgccctcttcaggcaggcaggcatgtatgcaggcagaatgctgtgtacaaaacaaatcaatttttaaaaagaaaagaaataaagcttgccaggcctggtggtccatgtctgtaatcccagcacttggagggcagagacagaaggatcagcagctttgaggcctggtctacacagcaagttccaggctagccagggcttcctagtgagatcctatctgaaaacccagaaagagggggcagtaggggaggtaggaagtgaacctatttgtgaattcattttcttttttaattttttaatgtttttgagaatgtcatacatgaatactgtttatatcatttccacccctcccctactcctccagtgcccccaccccgcactcaatttctttcattattattgttaccctcgtatgtatgtatgtacatagatatacacaacctattgatagtgagcacattgagttttgtgaatgtgtacatatgtttagggctgacccccttggtttttcaagacagggttatcctgtggctttggaggctgtcctggaactagctcttgtagaccaggctggtttcgaactcacagagatcggcctgcctctgcctcctgagtgctgggattaaaggtgtgcgccaccactgcccggcgaccccccctgggattggatcacgtatgagaagtttatccctggagaagactgattctccctctcacagcagccattggttgcctggagctctccatctaggggcggggtctttaagagttcccccattcgtgtaggcctgttagctggtgttgcccttgtgaaggtcttgttttgcagctatattgttaagattacatgggtgcagcttccctgtcatgtatagaaaacactaaccagcaggaggtggcctaacccgcttttcccataatgtcctctgagccttgggtataaaggtcatgttgtagatatatcaactggagttgggcaccccatggtcacttattctctgcattttgaccagttgtgatctctgtaatagactccatgtctcgaaaagaggtttgtttgtgaggacttagagctcgcctttttccatgggtataactgtatttagaatacagttagaaattacattggttcattttctgattatgaaaattagtcaactgctttagaatattgataatttagaaaagaaaggccaggcggtggtagcacactcaggaggcagaggcaggcagatctctgtaagttcgaggccagcctggtctatagagcaagtttcaggacagattcaaaaacaatacagagaaaccctgtctcaaaaaagaacaaaaaaaaaaaggcaaggaaggaagaaagaaaagaaagcagttattcttaattctactatcttatttttattgttattagtattactattattattatttattattattttttattattattattattattattattattattattattattattatatatgatgtgggggcacacttgccttgtcacatgtatggaggtcagaggacagctttatataaggagtatattttctcctccactttaatgtgagttccagagaacaaggtcaggttgtcaggactgtgcagtaagtgctttacctggtgagtcatcttgccaaactctctgcttccttagtatagtaaatagtgcctaagtgaaccccagagggctcttcgctggagagatggttcagtggttaggaacacttactgctttttcagactaccagggtttggtttgccacaccctcatggcaacttatcatcatctgtaactccaggtcagaggatccaaaactcccttttgacctccacagacaccagacacatgcatggtgtgcagacatacatgcaaacaaaatacccatatacataaaaaataagtaaatcattaaaggttataataggggtagggctataacaactcagtggtagagtgctagcctctaatgcatgaagcctacctactactgccaaaacacagtaatcatagtgtaaatgcaaatcgtatcatgttgtcagtatttctgttgcaataaatataccctgcatacatctctgtgtcttctaggctttatttttatgaaagatgcactatagagccaaagacttcctcatagactattattcaaaccaccaacccatctgtccccagcctctatttcttcactaaaggcagtcacctttcatgcctaaatttttttcagtgaattctttccaactctgcaaacaaaattctcttgccactaaggactggggaaggatgagttatttctggacagccagggatgttctccaggttccacaagcatggaccattagcccccctcatcatccctgcctccatactaaccagctcatcatctctgttctcctaatagaaccatgtcatcattgtagttatgctatcgttgtccatatgtcataaacaccactcacaactatgccctgttataaaacatcatgatattgccttgtattcttttccccaaagtgagttctgttcttagttgtcttctacttactactagttaactctcaaagcttcccagcatgccttgggagctcagctatatcatagattctattagacccatacacctgaatccttcccccagagacttctgacctcatcaagtctgctccccatgcctcgtacctgtcatcctaaggacatcatctgtattactctaggctctgctttctctctgatgttggttctgctgcttcgggattttgtattttcctcatattaacttattccttgtttttatggagcacattctccagtatctttttgagaaagggctcataggaagtcttgagattctggtatctgacatgccttcatgctcagctgactcgtaagtaatggtttagtaatgcattgagtcttcttagggatggtcttccttaaggcctgggggtggggggcgggcattattgagttgttctcaggcttcctgagctgatgagggaggggttcaaagttaccattccctaatccaatgcatgtaatctattttctcaccctcttaaagtttagaaatcttctcctttttctgataaaatacatggagttgggtttattttcacccattacaaagtacacaaagtagacctttccagtctacatgcatgtcctccagggtgagacattttctctattttctttctttctttctttctttctttatttctttctttcttcttttatctgagttggcttttgtaatcagcaattttcttttgatttctttgcctctgtttttttctcttctgatctcatttgaaagccccaagcactgaccttgtcaatgtttcttttgattcttcccacctgccgtcttatctttgggacttattgttaagtgtggtgaccttgatttttcatgtaacctgatattgaatccatcctactattttagtttaccttccaagacctttttctcctgactatttccttgtttaggtacctccttttatttcagattttcagtaacttcactgaggatctaagtggtactggcgggggaggcgggggagagacggggtggagggacggacgggggactattttcttctcctttataattctacctccttacaattagcactttttttttccctgtatatccccccacccccacttttcttgggttgctgtaatacttagttgtctgctgagacttaaaagtgtgccactgttaatcttcagagacaaagtgtaaattgactctttcctggtgctaagtaaggacttgagagaaatggggtgattgctaatgagtacacttatcttgcaagtgacaagaaacattgttaaattgattatgtgattgtcacataactctgggtctactaaacaacactgaattacacgatttcagtgagtcagttgtttgatgtgtgtgtgtgtgtgtgtgtgtgtgtgtgtgtgtgtgtgtgtgtgtgtatgtgtgtgtgtaatatctaaaaactgtcaaacaaaaagtgggatactactcgaagcatgtggctggggcttgtcctgcatggcatctgctctggggtgatttggcagagctatgagtgttaggagcctcttagatcagattctgtcttccagagtatgccagtttccccctgaagaggttgcccagtctctccagcctgtaggataaaggctggctttatggactaatcccagctcacacccatgttggttcctaacctgtgctttggtgctctctgatccgaaggtcccccattctacccactccagagactaagtctttttattttacttttttttttcttcttggttttttgagacagggtttctttctctgtagctttggaggctgtcctggaactcactcttgtaaaccaggctggtcttgaactcacagagatccacctgcctctgcctcccgagtgctgggattaacggcatgcgccaccaccgcccagccagagactaagttgagaaaagatagttgtgtagcagaaaggattctgggaggtgctctgcctgcttaactagactttcagccagaggcatctgtcttaactgcctccctctccccagctaaatgtacactttccctctcataactgatttttttaaagggggtctgtgaatcaaaattgagaacagaaagtgaaagggaagcatgtatcaaatacagttaattgtggggctagagagatgactcagaggttaagagcactgactgctcttccagaggtcctgagttcaattcccagtaaccacatggtggctcacaaccatctatatgagatctgctgccctcttctggcatgtaggcatacatacagacagaacattgtgtacataataagtaaatctttttttaaaaaaaataggcaatttgccttctctagttcctttgatgcattacattatgtactactgatattccattttcatttaaaaattttgatttggaaaaaaaaaaagacagaataagcatttatttccagacaagttattcttgtaattgcagaatcaaaaggtctgggcatatccctcccataccaaaagtaaaaatattatttttcatgtgcaaacagaaagatcagtcctgtctgaattcagagacctaattaagttcacttaagcataaggtttatggttggctattttaaaatttaaaaattaaaataaaagctgaggctcccagccaagtgctgaagcgttcccttggctttgccattattgaagttctcacttctcactgccccataaagagtagacagattgcatggctctgatagaaacgggagagagagacttgctattttctctacattcccctcacatggctctttggtcctagaggagtcagtcagttcatctgcaccgagtgtagggcccagagtattaaaatgatgggggaggaggcactagccaaccacaatcctcagagatgatcaggcagctggctaggctctgcttgcactgctggtgcctaggattacaaccaatatccaggacataagtcttaaagacatagccagtgactcaccgaggagagaaaaccattcattgtttacagtgccattttgccacatgtactgtcacattcaaggcaattctgaattgccttgtgactaaagcacttcagtgtcataaggtgttagtcatgactgatggctccaaaatcagctgtccctctctcaagcctggaaattcttttcccaatctaaattttgaagaaagaaaaaccagcttttgttttccatactgggggctgggtctaggcctcccatgtgctctgcacagccctcccactgaactctaccataaagccctgaaaagaccctgctctcaatgctataattgtgaggtttgtaatctgacctccccaagccatcacgaccatttaaaaactaactctatagtgtgaagggtctcatgagaaatgaatatctgagagacccctttctcaaagattgttaacaagagcattgtgatgtattttgattatcctagaattctaaaacttaagacaagaagagcataagttcaaggccagcctgagctatagagtacatctggggctagcctgggcaaggtagcaaaacacacacacacacacacacacacacacacacacatacacacacacacacacacacacacacaatgcagggcattaaactaaagtggggcctcccgagtatatgaattgcacatgtccataaagccagccctgaaaggaagacactgtttgtgtctctgctggttatatatatagtacacacattttaggcattaccataactaacacctctgctcaagggtctttactcccagatcagccagagctaatttattatgaagtaatttctaaatttccaccactcaaaccctggagttaagtcacaagcctagcacacatcatacaatagttccttccttggggttccctgccagggcactcagggctttcttcctgctctggcagtagctttcaataagtcagttcttcaagccaaattaaattaaaatttgagatctcctatttctaagctcctggcagttagtagagctaccctcccccaacacacacacacatacacacacacacacacacacacacacacacacacacacacacacacacacacctcccttattttttagttcagttcatctgagcacctgctactcattttagaaggaaattaaatcactagcatttctcttccccgttggcagtctttaaacatcctctcatgttcaggaacactttatattcaggcatgtccacgtgtcttttaacttgttgatcttgaattccgaatctgatccacgcttagaaattcatgtagctccaccctcacccttggaggcactctccactcacatgaccgactaaaatgtctcttaagggtttccagaaagatttaaaatgccattaagagatgtcaaggccccgtgagggaggaaaaggtctaatatgtacttatcataaataaaccccctatcttcctatctcagagcagtgcatgctttgataccttgaactttgaatacattggcatctgctctgtggttgcctttctgtgaaggctgttcccatgagtccgcctccaaacaagcagagcctgacctgggactaacctgactccctatgtagtccaggaagctgatgatgtttgtgtaagagcttatagctcctcaaccctgagaggaaagaaacagaaaccaagtgtggaagtgacaaagaaggaaattatcctagtgagccagagggtaacgctctggttaagaaagaaatggatgcctggaagatgccacacttctctgtagctaaagggcctgggaagactattgcacagaaaagagaaagagcttggagctttttgtttgaggggggcaggggggacaggacagagtttctctacataaccctggctatcctagaactctctctgtagacgaggctagtctcaaacttagagatccaactgcttctgcctccctagtgctgggattaaagacgtgtatagtggcatcttgccttcagaagtgcaccaccatcgccagtgcatgcatgtagctgttaaaagtagactatccttgagttttcctgagacctggcctctctgggagtgtcttgagtcagccccccaccccccagagaagatcgctcaatcacaataaatacagaggaaaaggaagagcatccatttcacaaacaatgcctcttttctctcctcatgagcagagagcaaaggcaagccatcaagcatgaagccttaagggggtctgaactataatctgttcccctggatgcacgctgcctcctttgaggcatttgtaggctgtatcacttttcacagagtaactttcacagagcttgggtttgttcactcagttattagccagctgtgtcacctaacatcaccaggcctaactaaggatatccaccacaaacaaagtcattgcaatagaaggcatggtgactcacacctacagttgtgattacatggaacacgaaaaataaaggacccagaccctgacgttagggttgaaacttcaagctgaagatcagaaaagcaaagcagcatgccactagcttcttgcctctacctcaggctgaatgggctgatcctgtctccctgagctctcaccaagtctcagactgtaacctctcctcatcatggctggagaatgaacgcctcctacttaaatacctctcatgagtcctgggattaaaggcgtgggctctgtttcttcaaacatgtcaaggtcattaataaatgaagttctgacaaacatcacaacccacaagtgaccaaagaaagatgctgactaaatgctgtgttgtgtcctgaatggggcagaaaggggactttagggaaaactgacaaaaacctggatgtgctgtggagtttgtttttaaaaagagagctgacacctcccatgtcaagtagcatcctgagaacctccactggagccagagccatactttctaggaacactctgtcatcctgagactattaggcagtcaagctttaaaactgtctcttgggggccaatgagatggctcagtggataaaggcagttgccaccaagcctgtgttcagggacctacatagtggtgggacagaaccaactatagaaagtgatgcatgcacgcatacacaccaaataaattttttctaactgccttgtaaaggtggccatgatggcacatgcctttaatcacagcactcgtgaggcaaaggcaggagggtggctatgagtttgaagccagcctggtctacaaagtgagttccaggacacccaaggctattacacagagaagccctgttttagagagagagagagagagagagagagagagagagagagagagtcaaaataaatcttccctcctttaaattacttctcttcagtatcagtcacagtgggaaatgtctaacccctcccagacaccctcctcccagacacccttcctttaaaaactgcctcttgacatcacgggttgtacattcttttaatcccctgcacagaagcaggggcaggcagatgtctatatgttcaaggttaacctggtctacatagcaagtagtaggccaggcagagctacagagtgggaccctgtatttaaaaaactaaataaataaataaataaataaataaataaataaaattagttttttaaaaacctgctacccgaagcctgaagtaatgggaatttgaatatacggactgtttacacaggatacaaataagtcactgttgagtaccgtgagtccttttgcagatggtttaactgtgattaatgagtgacatgggttgtattttaacctgctttggaatcccaacctctagaaggttagctgtgttcagcttcataactcagctcaaacttcctagctcccagagcttgaggtgagatcaaagaaggtttttttcttgtttgtttgtatatgtgccaaacgtaagaaaaggtctctgcttctctctagctgcccatactaggcacacagcccctgtgatttcagcaataaaagatagttatattctcacacagccgtgacatatgcatagcatctcctggttttatcccatgctttacttaaaaaaaaaaaatgatgttgtagtacattctgtgtaatcttagagttaaaatacatcctgggtggtcagtgtcgggatctcttggagggagactcggatcaactgttgtattcaccccgtcgcagctctcactgtgctctatgagaccccaatagtgaggtctgtgggcttcggtctcaatctctctaaaactgttgcctgttcaaaaccaggacatcccaaggttccctgggatgtgctgctgttatcccgcagccagtcaagcctgggctagaagcccgtgtctttgcacagtgttctttgcttcttgtgtgaaaccttaatggtaatgccttccctggcaggttgttcaaactgtaaatttgatggtgaatgtaaagtgtcaggcttaaaactacaggagggaaggttatcactctttgaggggtggtaattgctgttctttagtctcggctgcagtacgcttagaactgcaagatttttttttttactttctttttatttattctttgtgtttttcacaccatgcaccttgatcccattcatttccccatcccttcatgtctgcccttacaacccctccccccaaaatagaataaaatttaagaggaagaaaagaaaaactgataaaaggaaaacatctcgtcatagaagctgcagtgtgacacaggagtcgggcaatatatccttttgtccatatatcgttacttgcaagcgttcattggagagagtcattggtctggttcaaggcctctggtttctgctatactatcgatgctgggtcctcactgggactcctcttggatatcctgctgtttccctgtgttttggggaccctggagctttagatctgcagaacgggcccttgtatgtgttcctacagaccaaagatggagtggatgttggggtggaccaactcataacccagattctgggtctgggtagtttcagggttggtaaccctgccagctctccctatcctcaccaccagggtgagctctccagcattgcccctgctagttcaccccttgtaatgagcaaggtacagggccagttctgcttttgtgccctcagggtcaactctccctcacctgaaccataaggtccagctcttctgtgttgcccaggtgagatgtgagggccactctcccaagtgcagcagctggtgaggggcagggacagctctcccactctaggccagggctcccacctgcctcgggcatggtggggggcctctcttccctgcccatgccgctacatggcagatgaggagcagggccagatctctcatgttctccggtggctcacccgtgcccccgtaaacagagtcagttctacaatgctgcccagatgaggtgcaaggctcgctttcccgagtgttgcagttagaaaggaaagagtcagctccctcaccagctggaggtggtgggggggggtcatctttctctcactcccactaccacactgcagacaaggaaggaggtaccagctatgcccctctcacactctcagggcaggctcatctgccccatctacagggtcacctctactgtgctaccccggcaaggtgcagggcctggtctcctaagtgctgcagctgataacgggctgggtcacctttctcttacccatggtaccacattgcgtatgagagagaggcacaatgccgttctcatacactcagggccagctcacccatgcccctgtgaacagggtcagctctattgtgctgcccaggtggggtgtaggactctctctcctcagtgcttcagccagtaagttgcagggccagatctccctagtgttgcagccagtaccctcttggtcttgggtggtatcaggaatcatggccatctacagagaccacacatcggtgccatgaacccagacatgggccccagcagcaggaaactcgggtgaacaaaagtgacattacttaccccacacaatagagacagagagaggcagaatcagcctagagtgccaagacctctctgttgatctgtccccctgtgctgaaagaaatgatgccaacttactgaaatcattaaccagtcacctaagctgctggaaggaacatgtgtttttccctggaattgtttttttttttcctctggaactatgtcatggagaattacaatctagggttaattacatgttgtcgaggccaggccctgtgccaagtcttctggatgcttattcattatgtgcttgtagcaaggctggcctaagctctcatgattaccaccagtgctgggttgctcctggcaattggtagactgtcctagacagcaatattgcaccaaggggagctatttgagatcatctttccctcaatgggagaaagtgttgctaagaaaaattaggtcgttaacatgatgatagatgagtctgtgttcatcaaaatgctgtggggttaatttatttcctcggatatattctgagtgtaaaggcacctttttaaatttcaagattttagagctgtaaagagtgagctataacttttaaaaatcaaaatattgtcagtgaattcttttcactgagtcgtggatttagcacctgtcaattaacaaatcctataggagcctgtggatttgtgtgccccttgtcacagttctggattcccaccaggatctttgactccctgaacagtatcccttgttccatcattttgccagtagctgtagttattccaatgggagcagtaacttcaacagcccatggtaaaattggcccacaatgttttcttttgcctttcctgtaatggtgtgctgactctctacccttctgacttatgaaaatcaactgttaactttttcaatgcagcagctagtaggctctgccattatttatcactaaatagcatgaactttcacttaatcatctttttagaaattagcactcaaattgatctcttactaagtctctaccacacttttgagatcatgtgtatgtgtccatataatgtaatctcctgataatatggatttcttcctaccattcagtgacatcacatttaaaatgtttattctatggcaattgatgggaattcttaagtcagagctagatttattgttttgttaatcatctgctgttttagcttgcaagtatgctgtagctatgctgtttcattgtcaatgttacacataaattgaggaaataatctcttaatattagaaaattattctcctgtgtatcaacaaaacatcaaatcattggccaggtggtggcacacacctttaatcccagcactcaggaggcagaggcaggtggatctctgtgagttcaagaccagcctggtcttcaagagcgagttccaggacagcctccaaagccacagagaaaccctgcctctaaaacctccccctcccccaaaaaaatcatatcattgatgactgggtggagttctggaagacatttattttactctcactttattaatgtaaagtcaaataccagctgtcatcatttcagaactgtgcatcagtggaaggcacgctatgaacacaaatacagaagttctgcacagtctacatggcgatctgacagttaagggattatctggaccttatagtgaaactgttgagtattttactatgtataatgcaccatgtgaccttttttagtaaaaacttctgtaaataataattttatgataatactaataatggctgatatgcattgatcatgagtgacagatgtaagagttaacttctctggatcgtcacagatgttcttatattgctgacacaaggaggctaggatgaagctaaccccagggacttccagcactagatgaaaaagaaggcatttgtttactagatctttctcattaacaagaaacatggcagatccttggacttgtgtaatttatctcaaccttgtgtaaataaaagggacgtctgagtcagctttccattacctcaacaaaataccttataaagagaaaagatggggctagaaaggtggctcagtggttctcagtggttaagagaacttgttgttcctccagaagcctccagttccattccaagaagccatgtcaagtggctcacaatctcctgtaactcccacaccaagagattggacacctttggcctctgcaggcatctgcactcacatgcacatatgcccattcagacacaagcatctacatgcaattaaaaacaataaaaatacatttaaaaatagaaaaggtatggttaggctcaattacagagaatccagtccaagatccatcagtcccgatgctgtgggtctctctggtagtccagatacaaagcaggcagaaagcacatgttaagagttaagtcccttccatgaaataaaacaaacaaacaaacaaaagagatgggtcacactgtcccttttaaggtcatactctgaagcaactaaggacctcccactgggttctaccccaccttccagcaccatcctgggagccagctctggacatatgggccttcaggaagcatccatccaaatgacagcataaggtgactttatccccatcctatggggatatggctagagtatgtgctccaagtgatttgaataatgatccgtgtccagctaaataaccctgtagatgggcacccaggaagcaagggccaaagcttctgagagacttctaaatcaagtcatgttatgagacagcccctccaaggacatgctatgcaggagcctcagcgtgaatatttccagatcttttggattaattgccagtaagttgtttcatgcaaataggactcaagcacatgtgtgaatgacaggcagttattaagacaactagtgattagatcagacttggagacagagaactgaatgttcctcagagtaggtagaatacatgtgcctaggggggcaatttcaacaacaggttttacactttaatatttatatttgcaaattgcttctcatgttgacacataacaagaagccaggtgtgtgagcagggttaaatgatggtttctgtgtttagcacaacactgttgttttcttgcttacatatggcaccttctgtaaggtgtgacttggtaagtggctgcatacccatgctattcaaagctcacacacaccaatgaggtcctagcccactgaccagaatactggctagctctgtggacagactgagcacccgttctagttcagggggcacaagtacctcaaacacaaagcaatgtctgcgtttaacagtgtccctacacaagcatctcccatcccattcttggccgtattccataagatggctcttcctggtccatcattctcaaaggtatgccacaccatttctggatgtcactacttcaccattccctttcactacaaatcagtggttctcaaccttcctaatgttgcatcctatagacgggggtttctgtcccaccaggtcctgcagtcctttagtcccaaataaatacatagaggcttgtattaattataaactgtttggctaatggctcaggcttcttattggctagctctctcttaattattaacccatttctattaatctatgtatctccatgtggttctggcttaccggagaatgctccagcacgttactccttcggcagctacatagtgtctctcaggtggctcactctccccagaattctcctcgtctggtagcccaacctatacttcctgcctggctactggccaatcagtgttttgttcatcaaccaataagaaaaacatatatacagaagaacatttcccccatcagcatccctttaatacaattcctcatgtgtggggaccccaagcataaaattattttcattgctgcttcaaaagtgtaattttgctactgctacgaattgtaatgtaaatatttgtgtttccgatggtcttaggtgacccctgtgaaatggtcttttgacatcccagtccaaaggggtctcaacccacaagttaagaaccactgctttaaagtaaagacaattctagattcagctacctcaaaactaattattaaaaatgtagcttctgggcctggagagatagctcagcagttaagagcactggttgctcttcctagaggacctggttcaattcccagcacctacatggcagctcttgacctcctgtaactccagtttcagaggatgtgacaccttcccaaagacagacatgagagcaaaacatgaatgcgcatgaaataaaaatatttttttaaattcagcttcctaggcctgttggcattgctaatgcacatgaaagtttgagaatctgacttgaacagctgtaatgagctgacctatgattcgaacacacctggctatgatccataactcacagctaacactttgatctatagagctacaactagaagtaattaaagctcagccataattcagaaaccagagtaagttctccattcttcccagcacgtctataatgcctgatcatctctgccatgggggaaccagacaggcgcctcccttggtggccactgcagctctgttcaatttatttgtccctaaactgtttatgtccctaatgattcaggacgtggtgttgacatgcacctcagagactagcagttaccatgatattttctcattattcaacttaaagcccataattagagtggtgttagccaagccatgtatgagaaaccctcctgtcagtttgctcctctttgatgctaacagttcagtaaaacccagtcctgcctatgatattccagtagcagtgaacccttataattgcaaaacacatctgtgagagccaagctgcccttcaaatccattctcatattattttttccagcgtctttttcagctttattgttgacagactaaatgatgccccctttgccgagtgtggacatctcatcatacagttagaaccagagtaatgtctaaaatctaaagcataggcacacaaagaaataaaagttgttgttagattttcctaaagaaaagccttaagtttttaaggacagaaaatatagtatctaacagtgggtaggaattgtgctttttttcacgtacttaaaaataccattttttcctattatttatttggttagcatacaaagtaatgggtttctttgtagtattttcacactgagtgtcactacactttgttctcactcattctcttcctctgccctcccccatttccttgccttcctcctttctcattcctttccttcccccagatcaccccacttaagctttcttatcatagtacaatatgaatttcttaaaggattcctttcatgtatgaattcacatcaataaggggttcttttccagtcaagcatggtggcacatggcttaaaccctagcactcaaagtgggagcaggtagctttctgtgagctccaggccagtcaaggctacattacaaacaaagcgaggctctgtctcaggaggagagggatgctctttcctctcaaatggtgccatgagttaccagaagggagggagggttagtaaatccttccatttgctgagcccaggcttcacaataaccatttaacccactatggctcttgtgcgaggctgccatatgaagtaccactgactgggtggtaacatggcagaaatgtattgtctctcagttctgcagcccaaaagtccccaatcaaggtgttggcagggtccgttgcttctggggactgtgaggaaacttgtcccagctttttgtgtggcttctgggagtgtgcttgccatctttggcgttcctggggtgtagctctttgcttttatcttcacgtgaaattttctgtgtgtgtgtgtgtgtgtgtgtgtgtgtgtgtgtgtgtgtgtgtgtgtgtgtgtgttaccaatttctcacttgcataatgacacaggtcatgttggaacacagtgcaactgcttttatgacatcatctcaacacattagatctataacagccctgtgtccaaataaggtctctttctgggacactgggcagacacaaatcagctagtgacatcatcaatgaagaaagtgtgcttgttctgggttggcatcaggaagcactgaagagatgagagagaaacaagctgcaaacctcccctcaagaaagctgcctcgttgtggcataaaatggagggagggtggtgcctagcttgggaaccacttcctgctcaccttgtagtagtacttttctcatcaggaccaccatcctaaaaataatggcatggcgatgtatattaattttaaaaggttggcctttagcttaggcttgtccctaactagttcatatagctcaaactaccttgtttctattaatctactttggccatgtggcctttatcttttcttagtatggtacatctggcttgttccaagtttgctggtgaaatccatttacctagattcctcctcctcctctcactctctctgcccagaaagcctgcctgtcctctcttgcctagccattgatcattcagctcttattacaccaatcacagcagcacatcttcacaccatgtaaacaaatatcccacaatacaaacttttatctgtttctttagtttggcaaagaaaaggcattcccagttcaccatgttgtatttctaacaggccactctagtagcacactttgtgaagaggacatttgaagctatgaatcaaagtctttagggatccaaaaggacctcatcaaatccaaactccttatttttaagatgaggcaacccatggtccagaatgattcagtatctaattcaaatatggcatactcagcccctcagagccacatgggcaccagagctcagctaccgggattttcgttctagctcttccatgtaccatacttcgtctgtgagccaacaaagtcatggttgcctcatgattaaaaggtccctgtcctattgactttgcatgttatttctagctggagaggggaatgtagtctgttttgggggaataacccccttctggggtatttggggaaatgcctgagctgcaggattttcaggcacttcttagcctcacccctggaagccactcaaatagattgtctctcaaaaccacaagtatgagctctgggcaggaatcatatctgaccattaggaataacacagtttcctaaagagcagaagccattgatgttacaaaatgtgaaaaattaatttagtaatcgagtatacattttgatttattgttgttattcttggactggttggggatgtaaggctgttttgtgttttatatgttataataaaatgtgtaggtagccatttcccaaaagattttggtttgggtattttgttcccccactttaattcggtatagctgataaataaaaataatgtctgggcggggcggtggtggtgcgcgcctttaatcccaacatttgggaggcaaagggaggcagatctctgtgaattcaaggtcagcctggtctacagagctagttccaggacaaccaggctatacaaaccctgtcttgggaaaaaaagaaagatgtatattttaaatatgcaacatcatagtgttacatatatatagattgtggaataataccattatcaaactagcttacatgtccatcacatcacatggttagatttgtgggtaacaaaaagacaagtcagttgtcttatcaaatctcaagtgtaggatgtactattagtaactgtgccctctgtgctatgaactgggtctctaaaaatttgctcatctggcatggccaaacctttgtaccatctgaccaacataatttccccatttccttccttaaaattctgtacctatgtgaactctttctatatttgttcttccatgtctgtcttattttactatgcatgatatatatatatatatatatatatatatatatatatatatatatagtaagtctatttgtgtcaacttaaatagcctgatttcttttcttttcaaggctatataatgttccacagtatgtatgtgtatgtatgtacagtgtgtgtgtgtgtccatgaatgacgtttaaaatgttctcccgacttttttttttttttgaaagtttgctctattgatgacctagctatgtctaaactatttaccaacttacctttttcttttaatatagtacctggtatgaaacaggctatcaatctatatttgaatggtgtattgttttgtaaatagaaaagtagaatcaggtcttttaatgctgatagttcattattaaaatataatttggggaggggttggctttttgttattaagacaagtctcactgtgtagtcaaggccagcccaaaacccagtatataatcaggctagccttgagctcatgacagttctcctgactcagcatcatgagtgctggaattgcagatatgagccatttgaagttaatttatattatgaaatgctgagatcttacaaatcactcaatgaactgtgacaaacatgttccattcactggtagccatggaagaccacagtggggagctttctcccttctcaggatgttcccttctgcctctccctcctcctaactccaaggtcaaaactaataccacagtctgtctgtctgtctgcctgctttgggggtgttggtcattttcacttacacatctcttttaggatctatctcaattaatgtttctctgtcatgagataaggctggcatgggtttctttagtttttgttcttgttttaacacccacacagccgtcttgaggggggtatataggccaatggtagaatgcttcccttgcctgcatgaaaccctgtattcaatccctgatattttcaaaaaaaaaaaaaatatcattgattcccactccttttgacaaagccaaataatgaagatgtcactcaggacgatttgtcacttgtcaggttttctcttgctcttccttattaacggaacctttattgctgggactcagactctcttagaaaggggagactaattctcacagagactgggtggattgagacaatatatatttactgttgctccaggtcaggcctgggtttaattccaggtaacctgtgtttaaacaaggtagagttaaagctgaaaagtacaaaatacagagcaagaggctcagccttcacaggctcatcttagtatgtgtaacatgatcatagccatataagaaatgacctgctttaaatgggcatgtgcatgcttgtgtgtctttgttgggctaggctgctagaaagacaagcgaaagagagatggtgaagttccctgcaggttcccccttccagctaccatggacactgaactgactcctctagagagcagcagatcctcagctgccttctgaggccagctctctgagcagcaggcccttcctgtttcattctctgtcagttccaagccccagctttgtgctgtctctgcggcaggctttatgctggtaaacagggaggttaagccaagctctacagccacaggcagccatcaatcagtacttgagattgcccgctgctctgcatgctggctggaaacaggcagtctcctggcctaaaaatagcagaagtagagccaatgaaaaacagcagccatgctcctgactgcagagcagaaaaagacaggaactctcccaaaggtcgtgctcccagaggcagaagtggctaggagtgtggacagctggcagccgtggtcaaagcctcccacgttcctgggtcctttgggtaaccctgtggacatgcctcctctgctccaccaaagagctcagcatgtagggattctgtcttggagggacatgagcctgctgcatagtgacatttcccaggctatacatgggaagtcgggtgccaattcctgagaagagcaacagcctctcccctccaccatcagagtagggccagaggtggcattttgaccttggcttcccacctgggcattgtgggaacaagagcagcatgtgcctctaagaccaaatgaggtttggcaaccagcaagtgagtcccagctgtatttgtggttttccctacaaggagtgctctctacccacagtgttatcggttagtgttccagtagcaaagctttgaataccaaaacaggcatcctttccaagcacttgtgataaatccatgcaaagagacctcatcaaagggcaaggcccgggcccagagctgagaggaagccgctctcctctgttcgtaatgaaaagccttccctcaggttggcctttgtctcacccgcatagtggggcttggtcccttgagtgaccgctatgagatgggctggctgggttccctacgaatgaggagccagggttctgtgtccaggtgaggagttgccctacatcatggcaggtcatcacagaagccgggctttggctcagcctctgcccttcctttagacacccttggtttttttttttgttttgttttttgtttttgtttttttggtttttgcctaatgtagtcagctttaaaaggcaaaaattttataacatggagcagcctaaaatgtggcatgaatttaagcaaaagtgaggagggagttggagaccctactcactgagccttataaccttgatgccaggaacatttttcttggcatggcccagcaatcatgacattgagcccaaaaacaaaaacataactctaacttgccattggcccagcattaaatagtatttacatagccctgatactataaactctgtgtattgattttctaattttggaggcaacacatgaaggaaatgagaaaattctagttatcattgtaagataaaatatatgtattagtagccattatgaaatggatgcaaatttattttttatgtgcccaatacaaagtgagaggagggtaaagagagagaaggcaaagatgaagtaaagtggaatgtaacagatatgttacattctgttgtaatgatatgtggctgttggaattaagacagttaaatacaatttatagttgcaaaataaaatatatatagcaggtgtttgaaggaaactcaacattagagagtatacatgccccctggggaatcagtggataccactcttgagtgtcttttattccaagtttcatcaaaagatatgaagagggctgaaaagattgctcagcaagggttaagagctcttgttgctcttccagattcccagtaaccacagggctgctcacaaccgtctgtaactccagttccaggaaatctgatgccctcttttggcctctgagggcaccaggcatggacatgtaaacaaagcacttctacccataaaataataataaatctaaaaaattctcaccagaaaagctaaaaagagcaatactgatgggaattccctggaagaggcagtattcagatgggaacttcctggaagaggtggtattcaggctagagctgtgtcttcagaccctaacttacctccacaccatgtgatattttatgctatttcttttttaatcgaggcaatgaaaagatggcttttaaaagacaaaaactgtggctaggtccatctgttccccgaacacatgggcctgtgagaatgagctgtaaaaacactcattaggtcagcaaacagaaatcagtgttccgggatttaattgttgatgacagtttcaacggtccaaccaagctaatgctctgtgtgaaaccaaactgatgtcacttggcaggcgatagtaccatgaatgcccactgccaaaaggacaatgatgagatgagttcccctgcagcacactcgtctgtgagaagcttaaggcttatcaggagcagagtggcagccggtaccaggaccctaggcatctacgagacaaaagcagaaccaaatagatgcagtttcttgtgcagctcattgcacattagaggtacctggccctcaaaagctctagatggaaccctacggtacagaaccaggcaggctgccaggctcttaaacccagtcacgtagcttctcttctaaaatggacctaccctcgatgttagtccaagaaatggtgggcactctgaccctgccactagattctgagagcggtttttcccaagagagataccctcacttattagtgattcctaaaacagaacctaggaaattcgcaggctgagaaactataaattgattacaaatagacgggtccctgggaaatcaacagtgcagtttaaaaggggggggcaattcccagtggacattctcttactccatagcatttatctgaaaccctttgggggacagatcttttttctatgtgggccatctctaagggataaaacaatttgctgtagactgtgacttaaggtggggtttattcttgcattatctctttatgctttgtattacattattttttatttttattatttttaagtggcagtagataaacacttacatattcatataagttacccaggaagaccacaaatggaattccttacacctcttggcgaggcacagacccaacaccaatatcacccttttgtcttgctgttttccaatgttctgtccttagaaaccttgggaaacttcctatgggtaaaggcatcactttatttcagatgcagagggataattgtacatccctggctgatacccaatttaaatactgtcaaaacagaccagctcagccaagcatagtggcacatgccttcaataccagggctcaggagacataggcaagcagatatctaagaatttaaggccatcctggtctacatagtgagttccaggacagtcggatatgtctcaaataaataaataaataaataaataaataaataaataaataaataccagctccttcaccagagaatactggttataataccacaacaaaacatcacttatctgtattgcttgggcttttattgtttcccaaggtggtcctcataggggatctgtactgaggctttttctgtcccttcatccgactcccagataatgacatggagactccttattaattatgaaagctcggccctagcttaagcttgtttctacctagctattataacttaaattaacccatttctattaatttactctctgcctcgtggctttattacctcacctctgtattgcccattctgctttccctgcatctccaccttcttcccagcatcctctctgcccagaaatcctgcctagctattggccattcagctttttattaaatcattcagagtaacacatcttcacagtgtacaaaagtattattccacaacagggatcctcgtagaatacataatagcactccatgttgttaatccagatgtggtccttggaccagcccagcatgagcatcatcacctcaggcttggtagaaatgtactcatgggggctggagagatggctcagaggttaagagcactgactgctcttccagaggtcctgagctcaattcccagcaaccacatggtggctcacaaccatccgttatgagatctggtgccctcttctactggaagcagaatgttgtgtacataataaataaataaaatcttttaaaaaaacaaataaacatcttgttacaggtatttaaaaaaaaacaaagaaagaaatgtaactcatggactttacactagaccctctaattcagaactgccagtggaaggtcctagaacttgcattgtgaccaaccctccagagactttgatatatactgaaacctgagaaccacacaagcctttgaacctttcagaccccaaaatgggaagaaaagaaaggtggaggcagaggactttttgtaatgtatggatacattttgtaacctagcaatgtacggatacattttgtaaactagcaatgtacggatacatttttgtaaactagcaatgtatggataaatgagaggggcacagcagtcagaagtgaaaaccaaccactcaaaatcatagatgccagaggcttctagcttcacagaacccttggtttacaagacggtacccacaaattacctcctgcaaacgttatgaactgtcacatatatgggggtggagaaatgttattaataaagttttatttaagtttaaaaaattacatatttctaaaagatttttttaatttaaacctaaatggccacattttcagggtgactcaccaccacccccacacacaaaaaagattttaacccaaaattcacagccacagcctctttagccaataacttgggacacatacttgaatctgttctgcaggccacaaactcattattcatctttgtctttctagcaaagggttaccttccagttcaaccttcaccttggaagagggaaccatctacctgacggctgagccaaacactctggaaatacaggatgacaacgcctctgtgcttgacgtctatttagtgagtgactttctcctcttcttcacacatcctctttcatttacacaagactaagttgtgtaaagccaggtgctcttggggattttagagaaatgtttgcctcctgtcccttctacagacgacaagtcttaccaagctgtttttctcccatagtttgttagaatgttggcaagaattggtaggttaattgttgttttaacttctgcacactggctgcatcctaacctactgctatttcaaccaacagttgcgactctggagttaccagcctgcttctctagcaacagcctggctgctcaggccacagcctggtaggaattctattcctgcaggcactggctctgtcgctgccacgaaaggtggctttaactaaatttttatcactctgtgtataaataagactggagattcaaaggctggggtgaaaacctgctagctcagagaggttttgtggcaaaaaagctaaccttctctccttgttgatgtctccaaaagacctgtcctggatgccctctgatgctctatgattcctttctgtcaactaactgataactcagcctcctgacccaaggttaattttatttaatcaatgcaaatgcaaatttgtggttcacagagtgatcgaatatcccccaatagttaatactaactaagcagatataaccagatataacctcatgaagtaaaggtgaagcagggcaccttgatatcattccaacaaagtaagcttggcctttgactcaagtggtgccatcatggttgaatcttctttattttgtcattgcctttctgataaagcagtaggctagatggccctgagaagagctcaaattcagaacccaagagttgtctggatgacaccatttagggttgtcaccaactggctgtgtgagatgaacctgacttctttgactgtgcatccttctctgacagagaacagaagaacacagaacagaacctgccttgactacctcacaaggctgccttgaaaatacacaagtgttgggggcagggggcagtcctccattagtgcctgtctgactgcccgctccaccttggttgactgttagatagtgcaagaaaaataccttggcaggctagaagcagtgtttgccctgcaaattactcctccatgtgctgtactcatgcccagtgtcacatgaagtagggagaatgttgagtggaatggcaggtatcatttgcaatattgtgtttctaagtttaaacttaaaagaccctacagcctatagcctggtcccctctgcccacggggcccctccccccctgacttttgtgttccagccatgcacatcctcagcattcctcccacaagccctgtctccccgtcttcgctattcctatctacgtactctttctcagggccgatccatgcttgttcccttgcttcctttcttcataactccactcaaacagctttccatcttgaccaactctggaaaatagctagccattgtgaagggtggtctttataactgctaaatactatttattcttttcttttccttttggagacagggtctctccatgtagccctgcctgtcctggagttcactatgtagaccgtgctggcctcactcacagagatcctcctgcttctgcctcccaagtgctgggactaaaggcgtgcaccaccaactccagctttcttttctgctctttttctttaatgttctagcacagaagtcctcaaatctgttgatcccaaaacatccttgttttgggatcccaagaatcattgaggggggtaggttatgtctccaaaatgaaaacagaagatgtttacatattcattgatttaggatgatggtcatgatagctaagtaatacctgttgtattaatataacatgtgactttatcttacaaaatacaaataaacagtgaaaatagcattattttgcttcctgcagacgcctagcatctctggcttaatagaagctagagtggaggctcctgtcttacctatttccatagcaacttttttgtttggtggtgctgtcattgtttcttgagataaagtctcaggctaccctcaaacatacagtcctcctgcctctgcctcccaggtcctgtagttaaaaaaagttgcaccaccacactgggattatttctgtatgagtctttgccaccaggctcgaagtttcagttctggaaggaattctactgtagatgcagaaaagatggaaaagaaaacagcatgtgaacactgataggaaaccttttgacctagtggcccctacacagtttttctgggttttggagatagcctcttcacctgttgcaaaaccagaagagctgtaaattaaagagaactggacacctggagtcagcgcctgcctatgcgcctcaggggtcactgacctctgctcctcagggatcactgacctgggcttcagttctctgagacgccgtgccactctaacaggcagattcattccaaatcacacagttgcacagggtggctttccagacaagctacagttgttctccaagctctgccatttcataccctgctctaccaccatgtctcacttcaacgttagggcaatacatctagagcattcaaccccattaacttgtagttctgggatatgttttcttgccagagatattttcattttttactatcattttgaatgctgtgctacatgtgaaagatttagttcattgctcgcccatcagtgttttcatttgcctctacgttatggaagagggatagaaagaaaatccagtctggcctgggcaatttctctttcctttctttttgacctaattcagaagctttggatcccagccatttttatcccagccatatttaattgaatggccctggaggcttctgtgatgacattctgtttggtgttgtagcccaacgaagtctgatgtctcatgggaggttttccccttgaagatgaaatttttctttattagcagtgatatcttaatccactttctgtttaactgatccactaagaatttattacgctatgaaatatacaaatttaaaccacactgatttgcacatatcagataaaaggaaatttccttttagggatccatccaaacttgagcctgctggctaaggcagccttgcgactttcctctgtaatttgaactgaaatttaaaaggatggttgacctctgaagagagctaccagtttcatcatccatattcaggtgtttgattcaggtcccacccaagcttgctcccacactgctttccagagacccttccccttctcccagtgtactgccaggctttctggctcatttgcaaatatccaaatccagggagatgggctttctccagtgaccaaagatgtttcctattgaatgctgagctgatgagacgcagattagagtattgaaaagaatacaacagggctgagtagctgcactgatgaaaaatgggcgcttctcccgccttcctaacaggacagtcgcccccctcacccccacccccagtattgtaaggaaccaatgctattgcttcagatcctaaggcaggttttgcttgatgcagaatgcaatttgatgttgctggaaagaggaacaacaaaaagccattcccactggaagatagagcagaaagagtgccctttcatggctccctgggaatgggcttgtaagtgagagatgaagggactgcatttttaataacagaagtctaaagcatggtgccacccaacagcgccttctttacttctattactggctccctgagtttatagtctattgccttgacacttctcacattagcatcctctcaataacacagcctttatctgtgaaagtgcttctgcaaaatggccatttgaagtgcaaaaaatagctgcgtgtaaggaaaagaaacagttaagccatttttttagccataccagtattggagattagtgcaggcagcccttagacagcttgattattcggtgtgtttggggtggttaatggtgctctttgatcataggaagaagggtggcaaagaagtgagaatgattgaattaacagctgccacgccattatgcatgaggaaagcctgagaaaatatgaagacaaacactcaacaaattaggtcacaggggtcttagaaaattcacaggaggttttggcaaaagaaactgcatttctaaatttgaatttttagacttggagatgaatgacccctgcccagcctcacagcagtggttgggtctctttaatcattccttgcttaagctagtatgggctgccccagggggtgttgattggaaatagtggcatttccacagcctctctagatgaagctggattcctagcaacctgaggaactgctcacatgcccagtggggttttgtgagagcagaaaatggagaaaaggcacacagcccctcaggtttggaagctctgaactaaaacacctttcccttttgtcatatgcgtgcactgtggggaactgagatttcaaagagagtaaaataggcctcttagcccaacgcactggactccttatttgactaaataacgtttttaagacacatgaaagagctgggggagtcatatgcagacatagtggtgcacacctttgagtccagtgcttagaaggcagaagtgggaagatctctgtgagtttgagaccagcctggtctacatagcaagttccaggttagccaaagctttgtaatgagatcttgactcaaaaataaaggaaaggatgcccctgcatgtgtgctagcacactcagaggtgacagctattattaaaataggatagtatatgcttcaggtaagaagcctgtctggtttagatgggcaatcacagattttttttttttttaaacagagcatttaactgctattcaaaattagaattggagctggaattacaaaggcacactggctttccagttcggttaggctcagtttcagtgccagtttgcagggctgtggcaaggggatttctttgaaacatcctggctgcagtggccttgcagcccagtttgactctcacctttgaaatagctcagctcttcagttcttctaaggccatgcatgggggccctgctatttccctttctgtgtctttttctttgtccttgtcccactggcccctgctgcttctctttttgggtcagttcctgtccccttctcagtcttaggaagccagtgtttacttggctcctaagattctccaactgttgagaatgaaatgtctgagaggaaaccgccacctcaggtatgaacttcatgtcttccaggctcagaacccgtagtgatcaaatgacggaattacacaagatagaacttgggtctggtgaactcaacttcgctcatatagatttcctccctggtctctgaagtgtaagagccaggttccaacagagggtgcttaaggaccatccttataataaaaaaacaggggctggagagatggcttagtggttaagagcactggctgctcttctaaatgaagggggttcaattcccagcatccacgtggtctgttgtaactccagttctaggggatccagtgccctctcctggcaccagacctgcatatcatgcacagatatacatgcaggcaaatacatatacatagaaaatatatttttaaaatataggtgggtcgtgtcctcgcgccgtgcagggatgcgatctgtagcaacggccctcaatgtttgagtcgtgtattgtggagcttgaggctacaagcctaagtatctccagctcaaggagaagctagaacatgtattccccggatgcctgaacatctgtggcgaggggactccccaggtcaccgggttctttgaagtgacagtaaccgggaagttggttcactccaagaagagaggtgatggttatgtagatacagaaagcaagtttcggaaactggtgaccgccatcaaaactgccctggctcagtgccagtgagccccggaggcagggtcctgggacctcctgacagctgccttatgacaggaaggactgaaatgtgtcaaagacctgtggtctttccttgatgatcctgcagccaccaagtcaggccagagagtgcctctgtgagggggggtgtgcctcccagaatccacctgtgcatgcatcctgccctacccttctgccctcttcctcatctctccctgaattcctccatgtctcccatctatttacctgcctcggtttcccttctccagctcagactgcaagaagataagcagccatgttgccaactgttcccagttgaataaaagttagatgaggcaaatatatatatatatatatatatatatatatatatatatataacaaaagtgaccgtgtgtggtaatgcatgaggaggggtctagagagggagcctgagggcctggcttccctctttgtgtctgcctatattaatctcctgctgtaaggaattgctacaaactatgtggcttaagcaacacaaatgtgtcatctcctagaagtcaagggtctgaatgaaaatttcccacagtgtcttgctcccagtgaaggtgctgagaaaagatgtctacctgtgcttgcagcctctgctggcttcacatatttcctggcatttttttttcctggtttttcaattgacggtttctctgtatagtcctggctgtcctagagctcgctttgtagaccaggcgagatcactggccttgaactcagtgatctgcctgtctctgcctcccgagtgctggaattaaaggcatgcgccaccacatccagcatgtttcctgccattcttaaacctgcacagtgctctcctcctcaactccagggtcacccagacttccttgtaaccttctgtgtcttctcttctttttggtcattgaattatggtctcctctaatctagtgtgaccttaacttcttatgtatgagaagaccccaggtaagatcagtttctaaggtcacaagtagacagtaattttcagggccatccattcagcccaccacagactgacacacagacctccttctgtctatcctcttccttggctaacagctaggaggttggggagatgtttccaggttattttggattcttcacaaaatggtgttggataaatggctgtgtgaaaaggcttgtcttagggtgtgcagtatatttcaaactaattccctgggggtggacccaagcattggtatttccagggcccttcagctctgagcaccctgtcagtctcctgtaaaggagaactgtgtcactcctaagacccccttcctaagatctgatttgaatcaaatgcacctttcctctgaattagaaagtaaaccctatgaatgactgcccactgattgatgcccctcctttcgagaaaccctctgctgccacctactggtaagaaggcagctctgcacatggggatagtgaagactctgtattgaaacctaatgaagagtgagtatggggttcaatatataatttctgcacttgaccttatccttccaacattgtgcatgtcagttgagaaggcagcagtcttcaggtatcaaaggcagctcacatcacaggcccagcatctgccacctttctggttggcctggaggctacagttagaactgtgcacaggagagaggagaggctcatctcccttgagatccatgcacgccctactcatccatcaaaacaagttccccttgagtctctttgaaaggcgcccattagtggtttaagtcaacactcagcagcgcagcaccgcagacagcaactgtagcaaagtatcaacaaacgcccagctttaaaggctttccttaccagtagtctgaatgaccttggtttacaagctgatgaaatgacagtggggctcactctggtaccagaagtcccctgtagaattaccaggactcataaatcattgatgctctccatcatctccctgcctttggaaacaaataatgaagcagcagtctgtgtactaacagctgctgtacaacagatttgaaatgagaggccttggtctcccaacctgtcctctgagatgtgggaaatgaaggcagcttctctgccatctacctgctgcaggaatggggctctttgatggagcactgagggttggcaggcagcctgacaagtcgcaaggtttggccaacactcaagagttctgtcagtgacattctaccagattagacccaaatggatgtcttcatccaaagtgtgcaaatccttcaagaacagcgacattcccaagtttctatggtaacagaagaaagaatgttataaatcaggtcacttttaaaatacattggggtgacatcagagagatgggtcacagcaaagcatagtggtatctctttctgtatctaatgctgtctgatggcattcttagctttggggtttggtggaagcaagtggtctgtgttgtgtaatattaactaaggatgtgttacattcgtttatgctgtggaatgtttgtttagggatacaaaaacatgttgcatttatttaattcggtgaagctgtgttggtttgcctgcttaaaacacctggttggtccaataaagagctgaatgaccaataactaggcatgagaaggagaggcagggcttccaggcagagagaggtggacagttagacatctgatggcttgttttactactggccatgaggatatttgtttggaaaagagcaacatgtgagttcaggactgtgttcaagttgtactgtttggctttagggctcatgtaccagagcacacttcctgagccctgtgccctgagaaggcagagtggctcttgacatcgctttgtcctaaggcccccagcatcagtgctatggtgtgactgggacttgatctttatgaaccatgggtaattaacacatcacaagcccccaaagaagcatatggtattctaagaaaatcccaaacctaatacatgcttttccaggtgcaagttactgggagaaataacaacataaggtcccgcttataggcaggagttccaaactgatattaaaagtgagtctcacatctgctttttttcccctctctctctatttttccctcagtaaatgaaagtagtagccacctaagcacatggatggaacctgagcacagctgtgggagagaacttctcccactgcagaattctccagaggaactgggctgagctccagcacacacacagtgagaatcaactggaccttcaagctcctgagatgtcaggggagctttggtccgtggctgatcagcaggtggatatgaaaaaccccacactgttctgtgactgctgttgcttgctgactgtgaagaactgcatgaactatacttaagctgcttttctataccattgccaatcaccttcctggactgggaagtgctattttcctataggctcttgcattgtttcgttttgcatgcatatagtgattacacataagcaacatatggaatctgcttctatattttttaaaaatccatacatgcaaaatgataattaagatataaatcctctctctttgtttaaaagattttaatcatagcccatgtcattgaaagtttcaatctgtttcctttaaagatcagtataataagtctgcctttactttatagaaagctagcttctataaagattttttttcactgtttactagtgaaatgagaaaagcaaagctatttataaaaggccttatgttgtgtatatacattgtctttgaaatatttgtgatttagtttattgcttgtaaaagagaaattatataatttatttagtaaatactactgtaaactatagttttattgaaagaaataaaatattttgttctcaattgtggtcatacattgattccagtgacatagtctgtgtgtgtgtgtgtgtgtgtgtgtgtgtgtgtgtgtgtgtgtgtgtgtgttgggggatttgggtgatgaaaccttggactttccatacagtaggcaagtgctctaccactaaactataacctcagcccacatttatagattgcttattaaataagtaaagctttttaagagaaatagctgcagtgttgtgatttaaataaaagtagccccacataagctcgtatatttaaatgtttagagagtgccactatttgaaaggattaggaggcatggccttgttgttgacggaagtgtgtccctgggaatgggctttgagatttcaaagcccaagccaagcccagtagctctttcttcctgctgcctgcaaatctggatgtagaactctcagctacttctctagcaccatgtctaatgcctctgaaactgtaagccagccccaactataaatgccttcctttataagagttgctgtggtcatggagtctcttcaaagcaatagaacactgactaagacacctggctgatgtggctgtccttctgtatgctgccaatatgtgttgttttattggttgatgaataaagctgatttgtccaaaggtcaggcagaatcgagccaggcagaaaatccaaacagagatatgtagtgaaagaaggtagaatcagggagacaccatatagctaccagggaagcaagatgtgaggtaacaagccaggagcctcatggtaaaatatagaatattagtgatgggttaatttatatgtagagctagccagtgagaaacctaagtccttggccaaacaattaaaattaatattaagcctcagaatgattatttaataagtggcttcagggaccagcaggcaggagagaaacaggtccagtaggaccaggcaagacagagaaaagctttcatttacacctggcatagattttctggaatcctaagaaaacaaagctcatgacaggtagaaaagaaataatgcaattcctagttctaagacaagatctacctaacagtagattctgctcagcaaatccagtggacattcccaaatatactggtgtattagccactgtggtgtgctatggtaaccaacaactccaaaattgcaataaatttagtcaggacagttttccttttcactcacacatgtgggcatgatgcagctcagctctgagggttgtctttatctggggacctggagcagccctgaggtgtgccactgtaaggtcaatggaaggagaacaacggaagaatgtagcaattctacttgcatgaattacttttccattcatgttcctttggccaaagcaaatgacagtgatgccttaagccaatggggttggaagagtgctacttcccacatggaaatgaagccaggagatggggcagtgaatactgtaaacaaggaatttacactgtccggtaaccacggctacagaaaaaatgttcctaatgagatgctcagaataaaatacttaatgttaaagcagggtgtttcttgtaaacaaacagtataaaaattcataaatatagtctggaatcagcttatacttatttatacactcacacttgtagtgatatcttgcttgtacaaataaagcctgtctgaaggtcagagaatggaggttaccactagctaaccatagaggtctggaggtctgtacagacagacaggaagtgagctgggcagaaacaggatataagcagggagaaacaggaactacctctcttgtctgctgagacgctaaggaggtaaggtgtggtggtggcttgctccttctctctgatctctcagcattttcctctatatctaactcctggtttttattatttagatcaattaagaactccatttatggggctggagagatggctcagagattaagagcactgactgttcttccagaggtcctgagttcaattcccagcaaccacatggtagctcacaaccatctgttatgagatctggtgccctcttctggtgtgcagaaatacatggaagcagaatgttgtatacataataaataaataagatcttaaaaaaaaaaaagaactccatttacacacactcagtgtaagtagaaattttactagcaaagttgatgctgggaatccatcttgcattatgatttgttctaggttcatagattttgtgctgctgaagcagaatagcacacactaggtaattataaagaacagaaacctgcttatgattctagagcttgagaagtccaagacagactaaagcagaagggcaagatgaaagccagttccccagtccttttcatagaggcattgatccaggcatgaggacggggcctttgtgacctgattggtaaggcccaccacacccactgtcaaggtcatcctcttgcacttaaagtcatatgtcagtagattttaagcacctacaaaaagttctttgacagtgacagttagccacttcttggagaaatcatgcccagagacttctgatctgctgcaattctggctgactgatttctgggccttctctacccttgccattctgggatctctgttcagaagcaccctagggattccctccacctccctcttctgtcagaccttctcttttctggatgctgtgccttcctctttttggatttactagctccgtaaagcacaccaaagtcaaaaggtcagggggacatggctcaaggtgagccaagcagtttctccttggcaacttgaaacttaagcagagatatgtgggcatgtttgtaaatgagtcatcaaagtcagtatctcagagggctctgcatatagttttatagtgattttttctaaccaacaaattcctgtagtttctgtcttctgaaccccaaagtcttttaatcctttctttatgtttcataaatgcatgcatacgtacactgtgtgtgtgtgtgtgtgtgtgtgtgtgtgtgtgtgtgtgtgtatgtgtgtgtttctgagggtcaattccatgctaggcaagcactctaccactgagtgacacttccagtcacctcaactccttttttgtgagcaaagcaaagagacagagatgtagagagaaaagagcaataagagaatttatgaatagtgatcatgaggggctggggatgtggccagctaggagaatgcttgcctggaatgcaggaagtcctggacctgattcccaacaccacatagactggacaggacaatgcatgcctgtaatcctgacatttggagagtggggcaggaagatcagggctacaatgtcgtccttggctacacagcaagtgtgaggtcaatttggaatgtctcaagtaacaaaagtgatagcggggcatgatggtgtgcctctttaatcccagcatgtgagaggcagaggcaagcatatctctgtcagttcaaggccagcctgctctacatagcgagttccaatcagggttacactataagatctgtctaataaataaatacatatataaataaagaatacaggattgattacattgagtctggtttctataagacattcaggacaggtgtggtagtgcataccattatcccagcacttgggaggcagaggcaagtggatctctgtcagtcctaggacagccagaactatagtgagaccctttcttgggtggtggggggggggacattcaggcaagcgaggctagtggtgcattccaattccatccctgcctggtctaccaagtgagttcaaggagtgagctcaaggccagcccatgcgacttagaaaaacttggtctcaaattaaaagtttaatttagattggagagatggctcagtggttaagagcacatagtgctttttccagaacctgagttccatttccagcacctgcaataggaaactcacaaattcagtcactccagcttctgggggtccaataccctcttctggattctgcaggcatccacacacatgtggtattcactcacacagacacacatatgcatatataaataataaaatacatgttaactatctttatgcatatgggtacattttagttacttttctaacattatgataaaacaccatgaccaaagcaacttctagaaggaagggtctagttgggatcacggttccataggattaagaggctatcaccatcacagtaggcaggcgtggcagctagagatgggagctaagagcttatggcttgaaaattaagaagcaaagagagcaaactaggaatggtgggagtttcatcactctcatagtccacctccagtgccacaccgcctccaacaagaccacacctcctccatcaagaccacacctcctccaagaagaccacacctcctccaacaagaccacacctcctccaacaagaccacacctccctcaagaccacacctccctcaacaagaccacacctcctcagcctccccagacagcaccaccaactgaggactaagtggccatgttggtgctagaaatcaaacttaggtcttctatcagagcagttagtgctcttaacctctgcgccatctcgagcacccagagtaaatatatttttaaaaagaaaaataagtagagacgactctgtttggggttttgcattggggtgggtgatgtttatttttgcttgtttgttttttgtttgttttgaggcagggatactgtgtgtccctggctggcctggaacttgctaggtagtctaggttggcttcaaactcacaagctccacccacctctgtctctggctgctgagattgaaatcacttgccccatgcctagctagaggcagatttttaggaaaggaaatcactctaagaatggaaagatgatggggctagtagttgagagaaatgatgaggtagtggctgagaaaaagcccccaagcattggatcacagtgtgttgcccattacagtacctgtccctcccttttatagtttgaaggattttccacatgctctgtcctttcaacaaagcctgggtcaaaagggacatcagtcttctttgtaaattggctcctttcatgttaattccttgtttcagtcaccagtcccaactctcctgtcccataatcgctcatagaacatacagagcagccaggtagctgaacaaggaatcacccctagacgagatgctgcagatacacaaatctgaaaggggcatctgcggccatctaaagtgaaacagcagaagtcttctttcattgtcataacaacttcacttcctggtgaagcatttgggccccaaaagaaactctagagtactcaggttttccttgagaggggtccccaggccacttagcctctggttaaaccattatacctgccaattgacactcaaaaaggaacaaagctgtcacaacagcctactgccaaaacagaccctagaatagacccagaggtcaaactcgcatgtgcagaaatcccaagggttctcagccttctgtacacagtggccacactgggatgatgacaccatcctgatgattggtcctaccttaggaagcagacttaactggaagacatgtgacttggttacagaactcataaaaattccccaggttattccagtgcagccaaggtttagagccatgaatagccagtaaacacatttgcctgacctgtactatagtggcttacacagtgtgtttgacattgttttgctgctgctaattagccttttttgttgtatccctttttgttttgttttaattgaaggtcccttactggtcctgcttccgtgagtggccaggagggagggagggcagcaggtgagacaagaagggtaatttccaccatgttccatttccacagagaactaaacagactagcacagtcaatattgctgttacagtgggcagcatgggataaagatggggagtagaggtgtccttaaaaataatatacccccccccaaactggatgcctggtgtgaggcctgatctgcttcaccctaagagcaaattggaacatcaaaagctgtttggggctagtcaatggtggtgcacacctttaatcccagcactccggagacagaagtagaaggatctctgtgagtttgaaggccagccttgtctacaaagttccaggacagccagggctacatggagaaattccatgttttggcagatccaaaaaccagccaggtggggtgggggggctattagctgtttaggaaggccagaactatcagggatggagggagaagagtccaagggatgggggaaatatttatcaactgggatgaagggattgtccataccctgctgggaccccttagcccctcctgcctggcagggaaaggaacaggctacaggctacaacacccaagagcaggtctggggatgctccatgctccaggcaggggctggaggcagcacacaaaggcttgccctccagggagatgatggctgccacctagtttttctgccagggctcaggggtccttgacctcctcttagcagtttgcttgtaattcatgcttgatccctgtcaggttcttcttgctggcatccttggagctggcattttggtcttaaggggtacactagagtgccttgtagctaacagatggagcaaagaactaaggagaggcctccactcagctgtctcaaagatgaaagagaagcagacaagcagcaagttcaaaagggaacaggcagtggtacccaaccggcagttccagaaaccaggacaagtaaggtatttgagaagttaccatatgaaactgtgggatccacagccaaaccctgcctgtgagacttagtagtggaatggtcaccttggaattttcacaaggaaaacagggtgttgccacctttatgctcaagagctacagctgccatagccaagcttagttctgccttttaggctccccagcactggcactttcctcaccaagcctcacaatccactcaggttgtccctgtcaggttccaaagaacctcaggccaactgctaacagtggtgcctattagcatatcaaagctgaggctggcttctaggctcactcagcacctggcctcctctcagctcttcccgccacacccctaccctaatcttctctagctcatgggttcacttccctttccccagtttctcttccctagtacaaccctgcccttttagcaacacggtctcttgactctctctttcttggctccccctttcctctctctttgctctctcccttctctctttctcttctcatgtctcttctagatgcctctggcagtactctccctcctacctcgaatgaaaaccttctcctccaccacaacttagagctgtcattgtcctcacttcattcagtctcctctgccattgtgctctccctcactgccctcctttgcctaaccaacttctgacctcttgggtctcaaggaagtgtaccttcatcacccctcaaattgagacagggccacacttttggttatctctttggaacacttccatggctctgtaagaccttttaaattatctccttcccacacaagactataaactccacaagaacgtgttgattagataccttattcactggtatcttcagcaaccacagggcctggatctgtaggatgtttaggtagccggattgggggaggcggggtgggaggggggggatggaaaggcaaatatgagtgaggaaaaggaatggagattaaaaccagaaagcagacgactcctgcggtttgaaggtatgaaaagaagaaaaacttaagatgaccagactacacatataggtagcatacgaagtccatcccgaaagacaatttgtggtgaaaatttcatacagagatttcacttcatcagtgatccgtgtgtgaaaatggagactcgtgaaagctaaacaaagcaggaagctgtactgctttcattacagtcagagaccactgcaaagtgggtattctcagagccctggagcgaggcttgtccagtggaggggaggaccacagaggaaaccccattactactagagatactatctgaatgggatggagtaaaacaagaaagaggggaaatagccagccttttttcctacgcatccctaccctcagcctcccacaatgtctgtccttgactgaaccttttctgaaggtaattggcaaaggagtttgggaatgtaatttgcaaggatcagagccccctacaaaacagaaaaacaatccagacatgtgaatactaaccgcatgagaagacaggaacctgggaaccaggaggctgtagttattgcctgaccttccttccgagggtgaagaagacagagtactgtggcctggggccaagcagctcagcaggggtcactatttataatgacttgtagggttggataagggtgcttgtgataactgggttctgttgttttcgtttttttctgtttttgtttttgggttaatgattgatgtagaagggcccagcccacagtggggggtggtcctgagttgcataaaaaagcaggctgagcaagccaagaggagcaagccagcaagctgcactcctccaaggcctctgcttcaattcctgctttgaagtcaatccctgacttcctggatgatggacccagattgggactgtggggtgaaataatccccctccacacaagttgattttgacttgtgttttatcgtggcagtggggagcaaacagactaattcagtgttcttggtatttcacaagcctctcctggaaatagcaaaagacaggtagacccaagtttgtgtcccagctcagggacatgctaactggaggattaggacaagggaatttgcctctgggcttgagtctgtgaaacggaggctatactggcctcagtatgattgttagaagaactgaatgagagtttttgtaaagcacttcacccagtgtgatctatattattaacagaagatgctaagaacagggaccctctgaggatctgagccctcttcgaaatcctgtcccaggtgctcttcccgcaagctgtgctggctcccctgtctttccctggtgtcgggaaaccattagttcttgcgataactcagctgtcagtcacagctgcagccattggagcaagaagatccatgcccaaacttgttcacatggacgttggaagacaccatgtttggtcagacacctcagcccctggacctcctcttcatagcatggaagctagcatgccccagagtcaagagaagcagctgtcattcagtgattaccaagggaagggcaaccagcgatggtcaagaccaccccatgcctgtcctagggacaaataccactcccggctacagagccctggattctccatcatctgccccagactgaagtctccgcctgccaagctgaagagatatgaagagtgctgtctgtcccccactttcacaggtgtaggactgtgccccttaaataacatcaagatcagccacctgaccgtgcacgcgacctacacttaatgactgccgtttctcatgtgctgttcattccatcttcatgcaaagccctgagacattcactctatctgacagggaggaaacggaaactcagagaaatgaaatacggagccagtcacggaggcacacgcctattatcccagctctcagaagctgggggcttgagaattgggaattccacgccagcctgggcttcatagcaagtccctgactcaaaaaatacatgtaagacaaaagtttgaagggatttgggcaatatccaatttgaagggatttgggcaatatgaaaattatctcaaacctggaaataagtaaaaaaaaaaaaaaagattgctataactctttagctcaaagttacactaaaatggtgatcgtgaaggggaacaatttcaccccagacactagcagagaccattttacagggtctggagacatttgattatagcaactggatctggagtggatacaactgccatctagtggctagaatcaatgattgctgcaaccccacagcaaagaagtcaaagggctactattgagacatcctatccaaggaccatgtgaccatgtttgatttacgataacccccagcagtacaaagtgtgtgtaatcttcagaaataggttctagtggacaaccaagagcaataacgatagtctgtattggggggcagggaactttgggacctctcaaaacaacttgtggggaggtaccctatacctggcttgttctttttatggtgcttgcaatcaaaccaagagctttgtgtactattgagctatgacaccccccaacctcattctcactggatttgggtctcatctttgcacacaaacacacacacacaacaccccaccccaccccccaaccttagtcacttctctaaaggcccttggtgtaaatacagtattgttcagaatgcaatgaggcttaggattttctggaagaaattggaggcacagttcagcccattatacctttctgattaattttaacaccccttgggcaggttgtatgaaaagcaggctgagcaagccatgtggagcaagccaggaagcagcattccttccatggcctctgtttcagttcctgtcttaggtcttgccctagcttcccttgtgtatccgtgagaagtgtttttctctcctgttgaatgttatgctgtctagatgtagatgctgagccagcaaagccgtgcatgtttctattataccacagagcttccttgagggacaggagctacacgtgtgccaactccttaatcaacacaagcaccctctaaaatgggtgtctcagggccaagggtgtatgtagctcagtgatagagcacttgccaaacatgctgagtgtgggggcacacacatttaattccaactctgaaaggcagaggcagacagatctctgtgagtttgaggccagcctggtctacagagtgagttctaggccagtcaaggctgcatagtgagaccttgtctctaaaacaaacaaaaaccaaaaatgaatagcacaatatcccagccacaccagctgcctttttcctcatcaccccttgaataaatctccaaaaaggcctttccacgtttcatggttagcaattatttctttaaattagtcctgtttcgtatttattctcagtaacacttcatattggttgattaattcaaataccttatgaataagttaggtttttgttgtctagtgtgggttttttttgtttgtttgtttgttttttccccgagacagggtttctctgtgtagccttgactgttctggaacaatcttattttacataccaatcccagttacctctccctccggtccttccactccctccaccgtctatctccccatcccaccctcaaaccactcctcagagagggcgaggcctcccatgaggaatgatcaaagtctgtcacttcatttgaggcaggacctacgcctctcccctgtatctagactgagctaggtaaccctccatagggaatgggctccaaaaagccagttcatgcagtagggataaatattggttccactgccagcagccccatagacccccccccccaaagcctcccaatattcagggggagaactaagttttttgaaagcaagactatcttgttcattagcgcatcttcagaatcgcccgctggcactcagtaaaatggttgttagcgaataaactcgccgagatcagtatctacaccactcgtgttgcccaagacctgcgtcgcatgtttgccacagagcaggctctgggctctggttaaacgtatgcacagtgcatcgctgggcactcatcctcacagcggacctgcgcgcaggaggccggccgcggcgcttgcagggcacggccaccaggtggcgccaccgagtcctcgcgcgggggggcgaagcggccgcagagccggagcggtatgtgggcgctcggacggcgcgcagccgtgggcctgctaccccggacggcgtcgcgggcctcgacctcggtcgggatcccgcgcgggagggagccgatcggagcgtgcggccaccgaggcctgcacgtcacaaccaacgcggcctccgccggccgccagtcggtgagtatgcgcgctgcgggggccacactccggagcgcaggccgcgcccgcctctacgctcggggacgcgcgctgcgcgcatgcgccggggcgcacgggtgggaggcgcgcggcgtttgcgcgggctccggtcctcgggtgggaagatggctgtggggtgaggatcagtgcccgcgggggggatgtgtgcagtcttgcagctggccgtttcctttatgaagacttcagtttcagcaattaacacacggggtacggcgtgtgccgccaggcgtgtttattactgcgtgtactccggaggaagcacgcagactcgtggaagcctgggcttccgaaccagttccctttttcgtggcgtgggggggctagcggggcttgtggaggagcttggagtacggttctttgtcgtttgcctttgtcgtgtagccctggctagcctagagttgagtgtgtaccccaagctggtttcgaacttgtgatcctcctgcctcctcccgagtgccgcgatcacaggtgtaccagcaggaccagcttttgggaaacgacgggacctcggttccacatcccgagtccgcggctctcaagagccctgtgaccttgggggaatcctggctctctgggggcagggcttgactttctgtgccggggagattaaagggtgacacccactttgcgattttggcgggagtgttaaactatagtcacaaaggccctagcacttcagagaagttctggaagacgcaaagaaaagaatagattactccacggcttaaaaagagagcacccaaaggatagcagcggagttaaggaaggcttcctagggagggacttgatagatgacaaaggaggggactcagggagaattgcaggaaaaagaagagctggggaaaaggtggagtagcctgtgggtagtgctctctgcaggttcaaacccggcctaggatacatgagatcctgtctttaaaaattaaaaacaaaacagggctagccgtacagctcaggggtggggtagtcacttagcgatggagaggtcctgggctcatttcttaatactgaaagaaaagttaaaaacaaaacaaacagaagcggggcggcggtatgagagagacaggatttgaagggcgggacccaggaaccctgctttctcaaacgctctcccagatgttttcagccctgttctgctttccagctatctaattcttcccttgcctggcacctgacagctgggctccagtcccagctgtgcagtttggatctctgcgtctttgtgagcctgagcaacttcctctttggcatctcagtttcttcgcctgtaaaatacaaataccatccatctttattgtcagcttgggttctcactgactcactaatattcattgtccccagttgtcaaccttgatgctcttgcagtcattttgaagcgacaaaatgctctagacccatggcgggtgttcccagtggcccaatagggcattgttctgcttgcttccactgtctcaatgtgagcaaatgttcggcctgttcagtaacatgttttttttttttttttttttttcacatttgtgtccttcttggtgattttgttggttgaaagtggtccccaagcctagaactgcagtaaacacagtgagactgtgacatgccttacaaagaaaatgtgtgtcagatgtgcttcactccggcatgagttataagtgctattgcttcgtgttcaatatgaattaatcaataatataatactaaataaactatctttaaagagaaacaggtcccaaacaagattattcatcatccatttgatgatgatgaccctgggactttcaggacctgtgtccccctaagaacgaacagcaactttatagggacacccccctcttggtgatgtgtgggctggggagatgactcagcatttaaaaacacttacccataataaggcagcttgcagccttctacaactccagttattggagatgagatgccctcttctccctccaagggtacctgcacacatgttgtgaacactcatatacccaggcgaacacaaaataaaaaatacatattttttttttttaaatggctgctgctactgaagtccttccctcatggggtcataatgaggactctgtgtcctgtcagctacagacagagcagtgccaggcagatagagaatactgtaggaatgtggtggctggagcagtggttatcaggactgttgtcatcacttcctcaaagccccctctttgaaacatgccgccgcccttatcctacctctctgctcacttccaaccctgagccctgtgtcttcccttttctgagctcaccatagtcatcgcctgcttcagagcagtaactgtctctgaccctctgcattttgagacagtaagtcttaacgttaaaacttcttgctttgccagattgaagtcatgatgattgtttcaccggctctgtggtcacctcagcctcaccccatcgtctctctccacccaaccccatctccatacacacctgccatctgggctaagactacaccacttttctctggctctccactcaatctcatctggtcataatcaacacacatgtcattgcccagtgccctgtagttagggactaagaaaaatccacaggtcacaccttgctggtagaatccatcaggcacaggcagtcagtcagctcttgtttggactttagcagaattctgcctcattttttgatgctttttttttaagtcaaattctaggggtactggttgcttccctgtctctggtgagccgccaaatctcctaaacacttgcagcagtactaccatgggggagatggtctgtctgttgctacacagccatggccacttgagatgcagtcagcatagccaaggaccaaattctattttatctcagtaaattcagagaactccttaacctggcggtggtggcacatgcccttaatctcagcactcaggaggcaatgaaaggaggatctctgtaagttcaagggcggcctggtctacagaaggagttccaggcccaccaaggctgcacatagagaccctgtcttgaaaacaaacaaaaagcaagagagccccctgtgtctcatgactatcctatcaaatagcacaggcttagcaaagagactgggaaggcccataggaaaacattagggggtgatgggatgggggcatcaaatcctaagaattgtccctgagatgatgtcatgtggccgcttgtgaatctagaagtgctggtctgtgaatcatgtgttgctggattagactagactcaggtgtggtcattaatgctctttactttggcttttagagtttgaatctccactacctcgatcagattctgaacatcaaaaagcagagtgtctgcatggtacatttgaggaactcgggaactttggactacccaaggtgagaagaaaacacctcctgactcaggcatctcttcccatgtagaaactatcttctccttgggaacaacccttgttgacatcgttccaggtcgctaagcatctgccatgttacttttagtgactagtattactgtgtcgataccccagacttcctttaattcctccctattgttagatattttgggtttctttttttttttttttcagagttttattatttcctccagcatcctagttgaggaaggctgtcttagttagggtttctattgctgggaaaagacaccatgaccatggcaactcttacactgaaaaacatttaattgggtgggtggcctacagttcagaggttcagtccattatcatgttgagaagcatggccgcatgcaggcagacatggtgctggagaaggagctggtaggtttacatcataatctgcaggcaggaaggagactgtgtgtcacattgggcgcagcttgagcatatgacacctcaaagctgcttccacagtgacacacttactccaacaaggccatacccccaaatagtgccactccctatgggctaagcattcaaacacatgagtctatgatggccattcctattcaaaccaccacaaaggtcatacagctatagcaaatagaccacagacacagtgcttctccaggctgttgaaggctagatttccaccatgacatgagttggggagcctgactcctgcctccagctagcccttatctcatagtttgttgtctaggttaggccagcctacccaggttccatttggtaggaagaactggaagtatcgaaaggctaaaaatggcacttgttcctcgctctggtttcagtggaccaagctcagttgcttaaggaagctggaaatgaatctacagtgtctttgggaaaatagcattgtattccctgtagagtcagcactgcctcgggcaacccttttactacttgattatctactggaccctcctttcacatgcagaggtatccccagccccagggaccaaccaaacacacatgggcgtctctgtatacactctgaagtccaagatttctgagtgatgttcagtactatctctaagctgtaggaatgttccctgtgtctgtctatctgtacctttctctctccctctgtgtgtgtctctctctctccccctttctctctgcctctctctaatacacacacacacacacacacacacacacaccctataacaatggcaaaaggcaaaataaccaaaataattcctcccactgagacaatagcttcattgcagcccttggcagcagtggatagctcctgggcaacctgggacaagctctaccttggcaaaccaggaatccctgaccccagccttgggtgagcccaccttgcccaccatcctttcagatgtaaggaagacaggcagtgggaagcatgctctccttgagggcaaacagccattagagcccactgactaatgacaatactctgtgcctccaaaagctgtttcaagggtccaatgaactgattggtagtagattttccttgacacatctaggagctcttgactacttacttccagcccagtatgccacccctttatccaaatgtcttcctacttgaaagctgccttattttttacatacctctatgcccagatctgtgcacgaagggcagatcccctgaggtcatgtccaacagtaatattcataatgtccttagtttgctttgtacaactgagtcaggctccccttgcatcacctcacacacacataccctggcaatggggtgggccgggtaaagggtggatcagatgcagttaccacccagcagccactatgggtccctgggaacctcttggataatggagctgcccagtgaatgtctcatattactggggcacaaaaggccgcagaaggaagactggtagagcagtacattctttctttttgttgttggggattagacaccggccgttatacatggtacattcatatccagctctgaaccacttcccagtgcagcaatagtttatggtcataattcagatagcataaaagtcatcggaggtgttagtattcatcggcttctacagctgtcaccactatctaattccaggaaatgttcactactccagactgtgcccttcattagtcatggtccatccctccctccctctgctcccagaaactactaataactaaacctgtggagtcatagcaacatgcacggagttggggtcctttatttgtttgttttagactgaatctctatataacccaggctagccttgcactcacactcctcctgcctcagcttcaggagcgctgagattacaggtgttcagaaagcccagcttgcccctcattctgtgtctttcatgacatatctcttttatgtgtttgtttgttttgttgttttttgagaccgggtttctctgtgtagccctgactgtcctggaactcacagagatccacctgcctctgtctcctgagtgctgggactaaagttgtgtaccaccactcatatcttattttttttaaagatttatttattatgtatacctcgttcctcctcatgtatacctgcaggccaggagaggacaccagatctcattatagatggtcgtgagccatcatgtgggtactggaaattgaactcaggacctctggaagagcagccatctctcatcttaaccgctgagccatctctccaaccccccatatctcattttttttaatcttcattttaaaaccattaacaaagctcagtatctttttacatgctgactggccatttggatatattttatgaaatgtgtgtaagtgttttacccatttttctgttgggtattctttttatttatttgtattctggattagtccattttcagatacgtgcaatacaaacatttttttaccacattatatcttgcccaacaaaaatttagtaagcctcagtgtccagcagaagtaaatatgtgaaataaagaaaatctaatgaactagacacagtaggacacacctgtaatcgtagctgtttgaaaagccgaggcaggaggatcagaaattcaaggccaactacctaggaagaccttgtctcaaagaaaaacagacaaggtacttcatttttatatatttaaaatttaagatagtctagcagaacacagaaaaaaacttatcagatgcagccacctctagggatggtagttgtttaaaaaagaggctacttctctcgtaacttgtttcatgcaacttgaagtttttgctctgtgcatgctagatatttcccatcaatttaaacatataaatgaggggctagagagatggtttagcagttaagagcactgactgctaataggttttctgtatctcagtaataggtttctcccccaacaccgtaagacagatcaagccaagttgaaaaagtgaaagaacaggtttatttgtgctaagcacctcctgggtgagttctctggtcccaaagatcaaggcagaactaaagcagggaggttgtgtagcctgtaggtgagggatgatgacgtgtctgccacaagctgggtttgtgcccaagtgtggtcaaaaactgaaaactttagatgaggacttgggctgctggcaacttcaggggaggagccaaaaatcagaactgggctttttggtgcctgttgttgttgttgttgttgttgttgttgttgttgttgttgttgttgttggaaattctctgggggtggggggttggagagagagagagagagagatagggcttctcagatcctgcaggagaagctggagattccaaccaagcagctagtttccagaggacctagtttcaattcccagcacccacatgacagctcacaaatgtctgtaactccagttctgggggatctgacaccctcacacagatgtacatgcaggcaaaacaccaggcatgtaaaataaaaacaaatgagtcattaaaaaaatacactcaattctcagttaaaaaataaataataaaaatataaatgaaaagtaaatgagtgagaaaagctaggtgtggtggctctcaaccatgatgtcaacactgataaggctgaggtcagcccaggtgttgcccttcgtttgaagcctatcaggactgcaagacaagacagaaataaaagttgatacatgatcttggtactaaccagccaagacacgcagagaagcagagtaactggcagagcagggctgtcatgaaccctagggttttgggtctcacccacactccgtgttgctagctggttacttcctctgggaggcgtattttctttttagtttgtatttattgtgattgtgcattggtgaccatgcgccactgatgaccatgctctggtgggtttcttttctcctgcagctctctagatgagacagcttatgaaagacttgcagaggagacgctggacgccctggcagagttctttgaagaccttgcagacaagccctataccctggaggactacgatgtctcctttggggtaccttttgcctttttttttattctgtgtttcctccttaaaagctgtaacttagatgggtggtggtggtacacgcctttaatctccgcactcaggaggcagaggccagcttggtttacagagtcagttccaggacagtcagggcgacacagaaaaaccctgtctcaaaaaaaaaagcaaacagaaaatcctgtaacttagcctggagatatagttgggttggtagcgtgcttgcctagcatacacaaaaccttggctccagtccctagcactgcacacaactgaactactggcacatccctggaatcctagcactcaggaggtggaggcaggagggttagagactcaaggtcatcctctttgaacctatctcaaaaacacaaaaccaaccaacaacaaaaagaaacctcccatatacacatttaactgtagcttactaaaacaaaagaatacactccaggcaggcaagatgacacacagttgtaactctatagaatagagtagaggcaggaagatcactgaatgttcaaagccagcttggtctacacagtgaggtctagaccagccagcactacatactcaaaaataaataaataaataaataaataaataaataaataaataaataagtgggggtgggggatggtggagggcacagtgggtaaagctgctgtcccccaaaaccttataagctcagttgaattctaagaacccaccctgccatgcgagtggaaacatactcctcatacacaaacattcaaaataataaacaacaaataaaaaccccacccccaaaactcagaatcggctgtttaaggtagaatggagcaagcatgggaccacatgtggaatgtgaatcactcctgggcagtagtccacacgttggatcctggaaatctatttttttattctttaatactagggctgggtgaagggctctttccctaactacccaccccagggacacccacccaacccctgggaatctgtttctgaacagaagaggttcagagaggcagagtgacttgcccaaagtcactgacagagctgggctgtcacataaatcctatctttttttttttgaatcctatcttttaagatccaaccacaatctatgttgctagatggttatgtctgttggggactattttttaaatctgtattattatttcttaaatttacttattgtttttgtttgagtcagggtctctctatgtagacctggctgtctggagcttgctgtgtagaccaggctggccttgagatccactggaaatacatgtgcaccagcacaccttggctcacatggaattctgattcgcagcccctaggaattttgattgaattagtgtgcagtgtgctctaggcaaggaactggatttgcagatggcccccatgatggttgagaactgagttggatggcattaacccagccaatggaagctagagaagtttacatgctggccaccagggggcagactaagcaaaggtctgctcgggcctttaccattgggagaaaaatgtctccttttcttacctatcccctctccaccaccatcccaatccaggctgaggttaatcctcttgacagcaattaattaattccaggaaatgtcataaagtgtgcgttttggagtaaatcataggattatggagggcagatggttgttaaatgataggagaaatgattttttttaaaaaaaaaaaaaaaggattttcaaattcattatttttatttcttaatgagaagtcacacgtatatgaaggtccctggctcaacatgacatctcccatgtgcctacttcttcagatgaccaagtgacaacagtgtgtagtttttgcgcctgcaagggcagggctaatcttcactggcacgaatcagtaagcctggccaactgggcttgttctgctctgattggttggttggtgtgagggtctcctccaattggtcagtgcgccatagtaatggctcggtattttgtttcccacagagacttgtgttgaaggccaggttcccagctgagaggtgattgaaccatgaggcccctgacctgactaaagaattgctttgctgatagatttatgattcagtggactgttgcggggacagtggagagtatgggagaaggaggaaactgtgggatgtcggaagaagtgggtcactggagatatggtcttttaaataacttatttactttttattgtatgtgcactggtgttttgcctgcacatgtgtctgtgtgagggtgtcaggtcttggagttaaagacagttgtgagctgccatgtgggtgctgggaactgaacccaggtcctatgtaagagcagtcagtgctcctaagcaatgctctctctctccagcccccccccccaaaactcttgtttttaaagatttattcatttattatgtatatagtgttctatttgcaatgtgcctgaatgtcagaagagggcaccagatctcattatagatggttgtgagccaccatgtggttcctgggaattgacctctgagccttctctccagccccctggagatatgttctgaaagatgttccttatccctggaatgtctcttccccctttgcttcctggctgccatgaggagcccctcccccaccacacccttccgccactttggtgctgtgccatgccacagaccggaaacaacacagccagtataaatcttgccttgtgtggtctcagatatttgtcatagcagggaaagtgtgaataatgtgcccactctttccagatggactagtgttggctaaagaatggcagtagagagctgaaaacctttgctgtgtaatctacttgcagacagttctaaatgtcttgagatccctggtaagccagcactgctgctggttcagtccctcctgacactgacctttggaatagctgaaagcgctggggaaagattccgattacagtaaccaggctgggagagggaactgagctttgtgatttctgctttggtaaccgtgccctttactttggcagttagttccacaggctccccttggtcactgtttgtccaccggtccattcttccacgaatataataaatactcttacatccatcctgggtttgggtggaagcttgtaggtgctactgagtagcttcttcctaggcactcgagctagtagaagtgggagccagggacaacaagctccttcacacacaagtcgtgctaaatagttcaaaccaggagaggccacagggctgtgccaagtggaaagccccagataaccttctcagagactcctgcacgggtcctggagcaagaggggcctacagggaagatgccagaggacagctatagcactgtggagctgggtctcccgtggctggttttcgcttcttttgtcttgggagcacatatctgtttaatttttttaagattttatttatttattatgtatacaacactctgcttccatgtatatctgcacaccagaagagggcaccagatctcataacggatggttgtgatccaccatgtggttgctgggaattgaactcaggacctctggaagagcagtcagtgctcttaacctctgagccatctctccatatatgtttaattaatatgctctccgggatccctccaaagattgaggatcagaaagagtaaatggaggatgccctggttaagtgggccgtccctggtgtggtcactcattgtatagtagccaggtgcagatgtggagtccttaagcagatttcttgaggaggcaagccagatgttgagagcctcaccagagagacaggacttctgcagggcccgggctggttaggaaggagagtggacttggaagtcacatctggagagttagtcagcccttagcatttgtgctggagcgccaagcctcagcgtgtggggcagaaaacatagggggacatttatcaaccacggatacgtatgtaagtcagaggtgagcttgtagttccactgagtctgttggttccaagggggagcatgaaaccatagacttggatgaagagcctggtgcctagggactgctgagatagggggaattagcatcccatgtgcacaacactggagggggggcacattaacattgaatgtgtacagtgtttcagttttgccaggtgcacagatttctgaatggctctagagtaacagtgtgaatatactcagtactgctgtactgtgtgacttagttataagcaattttccaagataaaagagagaaaatacataaactagcagccaagaaggaaggttcaggagggtgagggggttgcctaggataggaaaaacagtatgtttgagtccaagcagccttgcatttcaaatcaactctgctggttgctaataatttgttttgtgtttttgccaccctggacctcttctataaaattgagatagtgattcctacctccacagctagttagaaacagttcccatgtgtgtccaaacacagatcctggcacaccctccgctctaagtaaagaggaatcagtgtgcctacttgctgtgtttatatgcctgcattcctgacttctctaacaggaacctctgtgtatttggtttggggttgggtttggtatagcttggtgtttttgtttattttttaaaaattttatttatctattatgtatataacactctgcttccatgtatatctgcacaccagaagagggcaccagatctcataacggatggttgtgatccaccatgtggttgctgggaattgaactcaggacctctggaagagcagtcagtgctcttaacctctgagccatctctccagcccctagcttggtgttttttagatagggcttcattttgcccaggctggcatcaaactggagtgtagccaagggtgaccttgaacttctgaccttctaccacctgagacctgggattacaaaacctgatgcaccttgggatggaacccagagctttgtgtgtcatagccaagcactctcccaaatgagcaacagcttcagtccctatttctttttctatttgttttttgttatttttgttttaatgggggggagcacatgttattttaaaagaaggaggaggaggaaacaaactgggcatagtggcacatgcctgtgatcctggcacttgggagacttggggcccaaatattataagtttgttgtctgccttggctacctagtgaaagcccatctcagagagagaaagagaaaccactagtgccccccttcatgcctattggttttattattattggtcccttagcatttatttaaatggctggctgtgtttgtgagggtgtgctatgaaaatcgtgtcaagactcctgattggacccacactctgcagagcgaggagcaagcattgttgcactaggctcccacctgcttaccagtagccatggtacagggaatgtttgtttcatagccggcccattctaaagtgtctaaggcctcagagagtggaggtctcctttgttgagtgtttgcaaatttaaatgttcatttattgaacaaaaatggactggccagtcttgtgagaatgcaaggctttttaggtggaaatgaagacttttggagtctctaatcacttgttagatgcctggggagtgtctggataacataggtggacgggggctgccccacctgctcttctaagacaaacaaggctgagctttggttactttttttcttctctcatctttttctgttttgcatttcggtgtgcagcctgctggcctcaagctcacaatctccccttaggttcccaagcactgacaatagattcttttttgttttgttttttttgtttgtttgttggttggttggttggttggtttctctgtactgctctggaggttgtcctggacattacagattcttgccaccacacctgctttcttatggacttgtcaggtctgaagtttattctgcatttgtacgtgtcctgattggcagtggagggcagaaagctagcggtcgggtttactattgcagagctctcaggcaagtcttgacctttcttctcttgctgaccacacaggcagagagaaatcagtgtgagtgtaagacccccgtaagctctaggatctcagcccaggaccatggtcaccccaatcaccaggcggagtcaaaagcttgatgcaaactgcatgaggctttattatagttgtttaacgagctaaccccatggtagcttgggtctttcatccacccgccatagcagatggctagaaaagacaggtcgaagcgtctgcatagagatcttatagggcagcgtaaggggagtgtctaggggtacacgcaggctcaggattggtatggctccaggcttggagggtttgtcctgtgttgattggtcaactagttgttatggcccatatgccctcccagggtggttgctatgctctgcatgtcattgctgtgcacttgtccgaaaagcacacccagagccataaagcatagcaccaccagctaacttctgattggttccttgccacaaggcaggaacctaacctcctagtgaccaaggcaaggtcagacaagcacgtgtttggctgttatggctgccgaaatggggagctggtcccttcatgagcttcaggcattattcctagcccactgtgatgactgccgagatgtctcagtggctgagagcttgctactctatcgtgagaaccagagtttggatcccagtacccacatcacatcaggtggctcacagacacctataactccagctgcaggggtcctgtgtgtctttgatctccaagataacttatgcacatatggatgaatggaagcaacttatgtctataagtaaaagtaaaacaagtctctaccccactctgatcctgatgataatatctttaccacacacattcctagttttgaacactaatttttgtttggttttggtgtcaagaattgaacagggggcttcccagctcctgaacacatatggccagtgcactgcatccccagaaccctttttttatgatgtgtattatatccttggatacatgaaaggcattgagatcagaataattatttgcatatatatttgttcttgtgctaactaatcttgtttgttttcttcacattttcttccacctgacccctagggcggcgttctaaccattaaactgggaggggatctagggacctacgtgatcaataaacagaccccgaacaagcaaatctggttatcttctccctgcaggtatgttcagaagtcaaaatctgtaaggagtgaactcttctgaccaattggggaccacttgagagggtgtctgtcactggctttgccatggttttacagttgtctgcctccacaggaaggctcgcttccaggtgaatgtttctccccatcaataacttggttcctatcctcaggcatcaggatgttgacaagacctgaagcaaagggaagttttcagaatctggcccagattctctttctctgttttgtcattgcccagaaaagaaaaatcactgacttgcctttgaaaaagatactttgctgggcctactgttacttatctatagttcagtactcaggaggcagaggcagtaactcacagtgccagctttacaacataaccagttcaaaggctagactgggctatcatgtaagactctgtcacaaaaacaaataggccaacctggtctatatagtgagttccaagccagccagggtgatacataagctacttttgttatgtatggcggcacaaagctggggtaataaataaataagtaaataaataagcaaataaaataattaattaaaaagctactttaagtctggggtgtacaccttagtaatagaatgcctgtctggctatctataagccccggattcaattcccaaaatggaaaggaaggagggtaaaaagggaggaactttttatattgtagcatctgagaaacctgtactttgtcctcaaagtgagttaaacttttactcccagcctgttttgaaggtctcagtaattccgttggcagagttgggctcagactctgtggcagtgggacagtgatttttagcagcagcttcagggcccccatcttcctgcctgccccgtggatgtgcctgcagttgaaggaacatcagggtgcactgcaggcagcgtgggtctcagaactaagaacttactagtgagcgagcatacagtgagctgcggcagtggtctggaaacggctgagagatgctcacgcagagacattcacacagagatgctcatacatagattctcacacagagatgctcacacaaagattctcacacagagatgctcacacagattgtgcacacagagatgctcacacagagatggtcccatagcagatgctcatacagagatggtcacacagcagatgctcacacaaagatgtttacacagagaagctcacacagagatgctctcacagagatgctcacacagagatgtttacacagaaccttcacactaaccttgctgagactcagcagtgccaccagagaaggcattttgaagaagtgggaaaagctcagctagaaaccagtgtggaattctttgaaagcctaatggcattgacagtttaaaaaaattaaaaagtgccagagtatggcttaatggcaaagaacttgcctaaaaggtgagagaaggctctgggttggattcccagcactgcaacaaatgtacaagcaaacaaaaactatattgagagcctgaagaggtgactcagtggttaagagcacttgctgctgtagcatgagaacaagaatttggatcctggcacccatatcaggcagctcacatacaccatggggaaattaaccgcttacagagactccaaacaaactctttaaaacctgccatttatgtgagggacttggagggaagtctcctaagtctcccttcatcacgtgtgctgtgttgctttcatggtggggtggcggggtggtaatttttccttatgtgtctatgggtgtaagtgtgagtgagtgcccgtgcccacagcagccagaagagggagtcgggtcccctggagctgaagtcacagcagttgtcagcagcccagattggcacgagaagtcaaaccagccctctggaagagcaatgagtgtcctgaaccattgagccagctctccagccccccaaaagtaatttcatatttatccagaatatctttcacagggccatggttatcatttatttcagaaggtgacttttgaggtcctgtggagatagtagtatttcctggctgccttgccgtaggatcataggatgggtagagaagagagctatggggacacctggaacaaaggacatacttatgttctttggtttcctctggttttatttttgtgtttttgtttttgtctctttgggggttggggatttaagacagggtttctgtgtgtatccctggctgttctggaactcgctctgtagatcaggctgttcttgaactcacaattgcccttaggaagacactgaccaggggaatcagaagtgtacttcactgcatgccactgtaaaactgcagttggtcagtctctgcgtggcaggcagttctgaggttctgttagttctccaatgaaaagagggagcatttgtttgggctcacggcatcagacactttagttcctattgcctttgagcctgtggtgaaacagaacatggcagggggtgtatggtggaaggaagttgactccctggtagctggaagcagagggaaacaggacaggctcccaatcactctgctggtgacttagcaagccaccgctaggccctaccctataatgttcccaccacctccaatagagtcatgagctggccactaagcttttaatcatgggccccagtgggatatttaagatccactctagccaaatgtagctggactttctttggaccaccagttcccaaataatgacatggagacttcttattaaatatgaaagcttaggcgtgtccccaactaactcttataacttaaattaaactatttatattaatctaccttcaaccatgtgactcattacctttcctctatactgtacatctgacttgttcccaatcttgctgacaaatcctatctctcttcttcccagagttcctgtccctgcccagaaatcccacctatcctctctacctagctattggctattcagctctttattaagccattcagaatgtgcctttcacactgtgatcaaatatccgcaacaaaatgtggttgctctaatcccaacattaggagacaggagaattgctacaagttgaaggccagctttggctatataaggaaagtccaggccacctgcatccaggtctaagatacagagtaagactctatcttcaaagatagataagccaggtggtggtgcacacctttagtcccactactcaggaggcaaaggcaggctggtctttgagagtttgaggtcagcccagtctacagagtgagtttcaggacagccagggctacacagagaaaccctgtctcaaaaaaccaaaaagaaaaagattgattgattgatttagcccaaacacagtggtgctcctgaagatggtcctcactgacttaacacacattcattttgttttacagtggccccaagcgctatgactggaccgggaagaactgggtgtactcccacgatggcgtgtccctgcatgagctgctggccagggagctgactgcagccttaaagaccaaactggacttgtcttccttggcctattctggaaaaggcgcctgaccgtccaccaattcaaagacattaaagctatcaggccaagaccccagctttcttctgtggctgagtgtctgctttcccttgcctgcttctgaggacagtcacactgtgtgtgacagctctgtgaaaaaagtgtgttacctcccaccctgtccccagatctgactcttcatttctacagaggtttgtgttgagtttctttccatgataccccctgatcacttacaatgtcttaccccctgggtgcatgatgacagcctcaggaacaggaaaagggcttccagggaaaaacatgttgttcccactcttcattctaaggacttatggtaaaagcttcatgaaaagtctcaggctgacctgccattgtgtctgaaatgacaccgtaaggtatagcttctaaatgtcactacaagtataaacatttcagagccctttagcagctaagtgtcaaaaggaacacctgtttgtgatttgtggcctatactgggcacccatgatgtgtgctttgtggtctatactgggcacccaggacctgtgttttgtgacctgtactgggtacccaggatctgggtgatgttgtctctatgctatcaaagacagtggtcattacagagtcatgctacaacatgaacctgggatatttttaaaaattgaaaactgggctaaaatgatcttagtccacaaagctcttaccacacaaacacgaagacagatcaggtttgatcctggaaatccacatttaaaaaccaggcatggtggtggtttgtaatcccagcactgcagactcagagctgagaggacccctggagcttgctgtccagcctgtttaacctcatctgtgagcccagggtctctgagagggacactctgtcaaagcaacaaggtacatgacttcagttgacctctgtcctccacacatgtgcacatgtaccacacaaacatgcttatacaccaattcacacatgctaaataaatgcacaggtaactacagacaaggaagaaaggaactaccacaacccaaaggattaaacagtgtcatgaagctaagtatgtatccatgagagatacctggctggcacagagagccctggccctccacttcccatctaatcagtgagagatagaattgatatccgacagtcagtggaggggacccatcaggcagtccaccaggctttcttttgttcccactaggtagatgggatgggcagcaaacaggcctttttctttttctttttttttttcttttttttttttaaggtctgcagaaatgggattgtctttgcttttgctctgttggattacagataaattcatattgagctagtagctgccccttgttctctgtgcactgagtccagcacaccatcacactgtttcagggattacaggctgcactttgtacaggaagcaacactccagaacatctacactgagccaccgtaaactcaggtcctggtatcctctgactgaaggacagttgcgggctgggattctagcccagtgaaaggccctgagttccatccccacactacaaaggcctgggagatgtgttaatggcaagtccatgcaaatagacagcagaggctatgcactgaacacattacatcatagaaaaaacaatgggacagtgtaaacaaaggctaagtgggtatttaagaaatttccttcctcacaaataaatttttttgttgttttagtctggtggaaatttttgagtggggtaagtcagtgctagtgagatgataaatagaaccatgtgtggacaaaactacgcacccgtctgtcttctagtgaaagtctgagcaccgactgcatgcttgaaacagtgagatgggatgtttacccacctgagacttaacggaacttgtagtatgccctggctgctgtagcagatggaagctgaggtgtctactgttaggactgcctcatagatcattcctgggcttcttaactctcactttacatgtctgactgctttccaaggcaagggaggatatccacaccctgctgtagtgattgttatagcatgatatattttactcttttgtggggggaagggagcgatacccagctccaaataactcactcacaaagtcttattcttatttataaatgcccagccttagcttggcttgtttctagccagcttttttaaacttaaatttcccatctactttttgcctctgggcttttaacttgatttctgtgtgccttacattccttactccatggctggctgggtggtggcccctggtatccccctctccttgttctctcattgctcctcctatttttgttttgttttgtttttcaagacagtgtttctctgtatagctttggagcctgtcctggcacttgttctgtagaccaggctggccttgaactgagagatccgcctgcctctgcctcccaaatgctctgctcctattttaactctctacctgccagtcctgtctagcctttctcctgcctcacaattggccattcagctcttttattaggatcatcgggtgttttcgacacacaaagaaccacagcttcactgagttaaacaaatgtagcataaacaaaagtcacacaccttaaaataatattctgccaccctgctgggtgagagatcatcctagcaccaagcatggtggtgcaattctgttgtcctgggactttgaacttcaaggctcaaaggtaacaaaagcaattaagtttgggcttgagttttttgtcatttgcttttgagacattgatatgtagcccagactgaccttgagtttaaaacaattctgtctttgtctcccaaatgttagggttgcaaatgtgccaccaaacttgacaataattaaaattttgatagcaggctgcccaggttttgcactacacaatttaagacaccactatccagagatgacagtaactaggctgggatataaatgatgccacccaccaagaaatgttcagaatataaggctacagcaggagatcacaaattcaagtctagcctgggtcacacaagaccctgtctccactcatattctagccaggtatggtagcacatgtctttaatctcggcactcaggagccgtgggcaggaagatcttttgagtttgaagccagcctagtctacatagtgagttttaggccagccagaccctgtatcaaaaaacaaaagataaactcatatctggaagcaagctgaaaaaaagaaaaacactacattatgagccacaactcaagccgaagacccaagagcatcacctcactctctatggtctagtcaccacaggcaaggttgctaccttttcagtctgaattttagaaagctattttgttgtttatagtgatatattatttatgatttattaaagcttgcctgaggattcagaaagcaaagtcagccttaggctatagagatcaggcagtggtggtacacactgctaatcccaggactcaggagacaaaggcagatggatctctctgagttcaaggccacccagggctacaagagattgaatcagtctaaaagtaacagagctcgcacctttaatcccagcattagagaggtataaaagataggatcagggtcttcagtaagtatcaggattagtctctagccatattgaggagagcatagcagtctgagtgaatctgaggagcagtgaagtcaggagcagtttgaggattgcccctttggtctgagctgaggtaggggtaagagctagtggctggcttctttgcttttctgaccttcagcttgaagcttgaatcccaatatctgtctctgggtcttttatttttcgtgctacaggtgtgtgtgtgtgtgtgtgtgtgtgtgtgtgtgtgtaaagattttattgatttattatgtatacagtcttctgcctgcatgccagcagagggcaccagatctcattaaaggtggttgtgagccaccatgtggttgctgggaattgaactcaggacctctggaagagcagtcagtgccttaaccactgagccatctctccagcccctgcagttgtttttctactttcttttttctttctttctttctttctttctttttttttttttgtggtgctgggaattgtgcatgctgggtaagtggtttgttactaaaccacaccccccaacttctccgagagagagagagaaaaagagagagagagagagagagagagagagagagagagagagcatgtgtacgtgaagttttataagtttgatgttttcattaaataataagtttacaatatgtcttctcctattacacttgcccaaattttaaaccctgtagccaccccccaaagaccagtgtctgtagagatgaagtttgtggagatccaggattgccaaggtatgctatcttccatcctctaaggtaaaagcaacaggaaataatttgcagttgcactcttttttttatttttttaaggttttatttatttattatttatacaacattctgcttccgtgtgtatctgcacaccagaagacggcaccagatctcataacagatggttgtgagtcaccatgtggtgctgagaattgaactcaggtcctctggaagagcagtcagtgctcttaacctctgagccatctctccagccctccagttgcactcttggcgcagatttgtcttttacaaactgaagcagctccctgccacacagagatggaaggaggcacaaagctatggagcatctcatgaatgtaggctactttttggctggggattaagttgggttggtagagtgcttgcctggtgggttcaaagtcctaagttctatgtccccagcactatgtaagtggcatggtgacacatgcctggaattgcagcacttaggaggtggaggcaggaaaatcggaaatttaagatcatagcaagttcaagatcagcctgtgctatacacatcctgcttccatgagtaaatctatgccactttttaaggtaaggtcatgaccgggtgcataagaaattgcttggaggggctgaagaaatggtgacgttgataaagtgcttaccacaaaaacatggtgacctgagttcagatccctagcaccttcatgaaaaagtagggcttggcagcacacacttgtaatctcagtgcagaggtggcagggacagatgactctcgagttcctggccttgacctccagagccactgaaagaccctgccaaaacaaaaggtggagagcaactgagaagacgcccatcatttgtcatgaacctctcacctccaagtgtgcacacataagtaagtgtcaagaatccttggtttaacctaactagttattggagtagataggagtagatactgaggccttgattaagggcctgcagtgtgtacagggacttacttgttgatttttttttttccttcagtaccaggaacttagggtttcacatatgttaggcaagcctacctctgacctatactcccagtccagatactcactttctgagtccacatctgctagagacagaatgcagattccaatgtcccgtctcccctgctcgtgtcaattaagaaatagaatgtaccagaacagattcattgaaccatttatgagaatgttgagaaaaacatctgtacccaccagcaacattgcttcccaaggacttatctaagaaaggagtcaggcatgacaggccattgcaagcacagagcttagtgtaagccacgcctctgaggacaactggcatggtctgtcttggcactgggaagcccacctgatgttttattttaggggctggagagatggtttggtagaggaccagagtcctcctagagagaagtagggtcttcaaatcccagcatctatgtatggcagttcttaactgcctgtgactccagctccaggggatcagatgccctcttcttgtttctgcaaatacttacacatatgtggcatttgtgtgacaaacttctcctagggagatgcaacacacatctacttaccccagatagggaacccatgacagaccaaagtgcagataccaccaaagttctacttggtgaaccagtgagttttattgaggtcacttacaggaatatgagggggttccttacaggagcagaaatgactctcaagacagcttcatcaccaaggcccaccccagtgtgggtaacagctcaaaaaagcagggaaacctggagcacacttcacagcctgtgggcagctcaataggttggagagtgtcctgtccaagtgactctgtccaaacctcctccaggcagcttgagcggtctctgcttctctcaggcagctcgcctggtctcagtcttctttgcagcttgtctgagagggactttcagcttttattgctttctttggcaggtaggagtccagtgcatctggtcagtttcagggacttcctggagctgttttgaatggtttaaggaccttgcctacatactggaatgtttcaatctcagagaaaactattacacaacaggcatacattcacacacatacatatattaattatatatatttgcaggcatacattcacacatacatacactaattatatatatttcacttggggcagatgcaggtggatctctgagtttgaagctagcttagtccacatatcaagttccagaacatagtaaaaccctgcctcaaaggggggagaggggctaaaaagatgtctcagcaattcctagcacccacatggtagctcacaaacactgacagacgcaaataaacctttaaaaaagaaacaattggtctttgctagccttctcaatggcaggtgggtgaaagaccccttagctcgttaaacaacaataaagcctcatgcagtttgcagcaagctttcgactctgcatggggattggggtggccaaggtcctgggctgagattctggaggcctgagctttccgggggtcttaaatttgggggctcgtcctggattttcgaccacccgtcacctgagtggagtcgatcttggagctgtcaaatgtaaaaaaaaaaaaaaaaaaaaaatcacactgagcaaaacctgtgaagcaagccagtaagcagcacccctccatggcctctgcatcagctcctgcctccaggatccggccctgcttgagttcctgtcctgacttccttcacgatgatggactgactatgatgtatgtggaagtgtaagccaaacaaacgctttcctccccaacgcacttttggtctttcattgcagccatagaaacttgatctaagacaataatacagaatgaaatgtgactaaaaaagaaaaaaaagaaaaaaaaaagaaacaattgctgaagaatcacttgaatccaccaatgagccaaacaagggttttctgtgtttaaaggattttgttcactgtcataatcatcatcattatcatcatcattattatgatttttttcaagacaggatttctctgtatagctctgactgttctagatctcacagtgtaaatcaggctggccttgaactcacagagatttgcctgcttctgcctcccaagtgctgggattaaaggcgtgcaccaccaacgcccggctttcaaacattcaaaatgcaatttattttatttctttcttttgtcgctagcatttggcatatctagaagaggctagaggaagttagaatctatatcattcaaagtctaaaaccagggaagaaacgaacaatttgaaattcctcatttggccaggtccggaattaaaatcacatgtactacaggtgttttcagtcagaaatgctgtgttttgtaactaaggagcccaaacttggacttgactagtgaagatttacaggtgctgtctgaagaacaatactagcagccaattggctgattctagcatgtatactgcttggcttgtgaaaattgtataaatatttcttaaatccagcctccaggttctcggaaatcagttgccttcttctgattcccatgacttgtttaaacaaatacgcaactttttttcctctaaaagatcacacacttaagtgtcagctgcctgtgggtagaaacagagaaaacaggccctgctgtgaatttacaagccagttgagcagctgtgcttcttggctaagaaagccccacccagaaccctggaagggtgtatatgagcccatggggtaacaagcacccatcagctatatgtgacgtcatctttactcatccatttgctgatgatgcacctgttaaaggtgggggccactagaaagccacaacagcctcagctgaggaccctcacccactgacatgccttgccagagcgtttggggtaggtaaaacagggcttcccttgcgggatggagtctgagtgacgcacagaactagacccagggacagaactttaaaaaggccccaccagccgaggaggaggaggcattctcagagaaggcagccacaccctctctggtagaatttggaagtcactggaaggtctgagaactttgccctctcccaacctcagggctggctgaagcagctggactcgaaaaggtctgcaatgccaacactatggcttaaataaatcctaagagaaagagaattcctaaaatctctaagattaaaaaataacaagggactagagaggtggctcaacagttaagaagagcattggctgctcttccagaggtcctgagttcaattcccagcaaccacatggtggctcacaaccatctgtaatgagatctggtgccctcttctggtgtgcaagcatacatgcagatagaacacggtatacataataaataaatcttttttttttttttttaagtgtgatgtaaggctgtccaggctttgagttgcacaattcaagatgccacttgccacaatgtctgtaggatgtaactgatgccaccaagtactgtacaggacatttaagtgtgtccatctaaccctgctggaccttatcttgccggtccacccacgatccatcaggatccatgaaaacaccctcggatctgccttctccagaccccagccagtaacttgctgatcaggtgcccctgttaaataccctgagtgctcaggctggagaaggccagctcgactctcttcctttcctgcactacacagaagcaaatgtaatggaaagatggctcaggggttaaagattgaagacatggctcagtggttaggagtgcttactggttgcttttgcaacggatcagggtttggttcccagcatccatgtggtagctcaaaactatctgtagttccagctccaggggatctgacactcatttcagaccttcccaagcaccaggttttcataagatgtgcatacgtgtgagcaaaaatttcatatatatgaaaagaaaaaaagaattgcaagttataccaaaaagtagaaaatgacccaagtctaaaggaatgctgttcaagtgtgcaaagccctggaccacaaggggaacagagtgaagtcacaccctgagcagcaaggcaggagagcaatccagagcccggagaggacagaaaatattctttcttcttaaggagaatcaagacctttgctttcttcctgctcagagagggggctgaggaggataattacttcttggatctggtggttatgtgccttcatgccttcagaggagtgcaagactgtagaagggggaaggaggaaagactagggctattaatagctttggctgtgcctgaagaatgacacagggctctacagaactggagggtagggaggctgtgcaggcggccacttcctttgctgtgccctggtgccaaggctttgacatggaaagagaaggagtcccaagagcagctcggaaaagagggaggtcccccagaagcttggggaggtgaggttcacttggggaaggctgaagactcccaagagtaacaactcagggacacccacatggctacaatccccaaaagaacttattttcactaaggtcaattagaagcagtgtggagatcggtcattaaaatttaaacaatattaagcaaggtgtggtattgcaaagcagtgatgctagcacttaggagcctgaaacaggagggttgccaccagtgtagatgcaaagtagcttccaggacagcctgggacacagaatgagaccttgtctcaaaaaaaaaaaaaaaaaaaagaaagaaaaagaaaagaaaagaaaagcctccttaccatggtggtacttgcctgtaatcccaatacctgggaggtggaggcaggagaatcaaaagttctgggggctggagagatgcctcaatggtcaagcatcctcttccagaggttcagactttgttcccagcactcactttggcagatcacaaccattggtactctaggtccagggcatccaacacccttttctggcccctgtggtcattcaggaatatatagcctgcacatagatgtagattaaaattttcaaaatttaaaataaaaatatttcaaggccagtttcagctacataaggaatttgaggccagcctgggctactttaagaccctttctcaaaaaactagaatgagatgatcatggttgaggaaaggatggggagggttatttagaccaaaaataaaaatgcatgaaaaaccttcatggaaatcagttatttttcttgaaaaataaatttttttgcataatatattttgattacagttttcccagtacccacatgtcagcccataactgtctgtagctccaattccaggggatctgtcaccgacacaggcatgcaagtaagcaagacaccaatgcacataaaataagtaaatcttttttaaaaaaaataaagaaatcccctaaagacacaaaaccagaaactgtaatagagtaaaaacctatagggttaaaaagaatacccagacaaagcactgagacaaaaaaaaaaaaaccaaaaaaacaaaaacgaaactccaaattaccaatgagtttgttttgcgttggccatctactgccgggcatggggtctgcccttatatatggaaactaactactttgtagtctaatttaaaactatattttataagaggggagcagttttgtaaagagtcgaggcctgagtcaatgtgtatgacatggacacagccatttcaaggacaaaggcctcagacccatggaaaatccacaaagccttcccacttggtcaaaccgggcaaggtaaacccttctggttcacgtgtgtgcaaaaactggcaactacagattcctcttcctggaagtttacagctgggggctgctcacctccagactactcaacttctccctactgtgctgtataaaacagatgtacccaatatctggactgttgtagtagttggtgccacccatcactgggcacgcagctcacgtcactccagcttttctgtgtacatggctgtcatttcttcattccctcaccatcctagtcagagtgtcaggatcaaggcaaggtaatgtagcagagtttgaacacaggtaccctgtaggagtagacatgtttccctgagaagacatgaattattacatgcaaatatctccatgcatgtggtattaaaaaaatctcaatgcaggctgcattgagaaaacattaaagagagagaaagacaagagaatagagaatatgtctcagtgctaggcaagggatatcttcctaccatttattggccatggaggccacagagatgtccaaagtaacaaaggctcttgccattactcttggttgtccactataaccaaatagtaaggccctactgctaaaggcaccaacacattttaattgtaggacataccgaaatcattaggactccaggaaacttcctccctgctggctagttttcatagtgctagaaggtgcaatgtagcccacagggaagaaaaaacatcaacggtgttacacaggtgaatgccaaatgatataaaactgacctgccagcaagatgcacccactggtgtaatagtggcataaacgttatgggaggtaaccacctgctttctgattggtttgaggcctgttccacagcagggaactcatgccttgctctgtaagcttgatcaagagcccatggctttggagatcataaccctaagggggaagctactactgtcgttttactaaatggacatgttatcagatctaagtatttgttttacctatagattagggctgctctcaactttacacacagaagcttattttttcagtagctaataattaatggagaggcttatacctggccacagtactaagaacaagtgactattgagtcctcagacttaaataggacatctatatttaacccctcccctcaagactcagagaacatggaggaaaggggtgtggtgagagaatgtaggagccaggaggtgtggaggagtactgtaaaatgctgtctcctggacatgatagtatcattgcacttacgagctctggcagaatccactcaggcagcaccccggtcagcccaggcttccatgggaactgagtctacacgcaggtgtagaggacccctttaaaagacagacccctgcccacttacgctctctctgcttcttcccctcttctcccacctacgctctctctgcctctctgtctcttctctctgcctctctctctatgtcgaccagccacggcggtcagccattaaccctgttcctcttctctcttagtctctctactctgccgggcctataataaactggtttaatatgtctaatagtctcacgtctcatcttgcgcctcttctttatttctaatttaagcaaaataataacaactggacgtatcaagccaacaagactgatcaagtcagtcagcgctttagcaggtagcattaactgaactaagtgggtttaagggagaaagaaagggaaagagagagaggggggggaaggagagagagagagagagagagagagagagagagagagagagagagagagagagagagcaccatgggcaggtaggaaggatacaagttggtggggtgtgtgggaggggagtaattgaaggtggatatgatcaaggtacattatatacatgtatgaggttgttaaagaataaatgaaagctattttaagaacaattaaaataattagtaatattaataacatgggcgtaagtagtgttgaaatttttttagaatgcttttccaagttgcttaaagcctagagaaggaaaatgacatgtttagtagacataaattataggatcagcacaagcagtcattgagatgatgagtcagaacttataaattgactttgtgtgggtcttcccaagtaggtaggagtgtgtttgtgtatgtctgcacgtgtgtgtgtgcatgtgtctgtgtctgtgtgtctgtttgtctgtgtgtctgtgtctgtgtgtttaatggcatgattcttttttgtgtgaattattttattttaaaaaatttatttttcactgggtgctggtggcacacgcctttagtcccagcactcaggaggcagaggcatgtggatccctgtgagttggagaccagcctggtctacaagagctagttccaggacagcctccaaagtcacagagaaaccctgtctcaaaaaatcaaaaagaaatttttttcattttacatactagccccagttccccctccctcctcttctcccacctctccacctccccctttcccaccccccatccactcctcagagagggtaaggccttccttgaggagtcaacaaagtttggcataccaagttgagacaagatcaagcccctccctcctgtatcaaggctgagcaagctatccctccatagggaatggcaaccaaaaagccagttcatccacctgggataggtcctggtgccactgccagtggcatctgattctatcagttactgaatgtaggttctatgatgacaattagagtagtcattaatctgattaaaggggaaggccagttcaggcattctctccactattgctaggagtcttagctggggtcatccttgtggattcctgagaatctccctaacaccataatggttccctctatcaagggaacccattgctctcacttgccatccatcccccaactcagtcttctggatccctcagttcccatcccgattttctcccttctgcctcccctcccagtttatccaggagatcttaactatttttccttcccggggccctccatgtgtgtccctcttaggttcttacctagcttctctggagctgtggattgtagtctgtatcctttgctttaaatctaatatccacttatgagtgagaatacatactgtgtttgtctttctgagtttgggttacctcactcaggatggtttttttctagttccattcatttgcctgcaaatttcaagatgtcattttttttttcactgagtaatactccattgtgtaaatgtaccacattttctttatccattcctcggttgaggggcatctaggttgcttccaggttctggctattccaaataatgctgctatgaacacagtttatcaaatgtccttgtggtgtgattgtgcatcctttgggtatatgcccaagagtagtattgtagagtcttaaggtagattgattcctaatttcctgagaaaccgccatactgatttccaaagtggctgtacaagtttgcactcccaccagcaatggagaagtgttcccctcactccacatcatctccagaataagctgtcattggtgaaaggttcaggatttaatgctgattggctctacctctttaagagacagaccccgcccccctgacaacagtcagggcaggcacaggaacgtgccatcaccacatcacccaccacgcatttacagcctgcttgaggactctgggcatgcgtggaacctcagtgtgcatgtgcagtcttccctttaagtttcaacttccctgcttcactctctctctccttctgcttttctcttctctctgtctcttctctctctccttctgctcttctcttctctctgcctctctatggtgaccagccatggcagttagccattacccctgttcctcttctcttttagtctccctactctgccgggcctataataaaatggttaatatgtctcatcttgcgcctcctctttttctttatatataatttaaacaaaaacctaacaattggtgttttttatcttagccattctgataggtgtaagatggaatctcagagttgttttgatttgcatttccctgatggctaaagatgttgagcaattctttaaatgtctttcagccatttgagtttcttctactgagaatcctctgtttagatttgtacaccccacctcccatttttaattggattatttggtattttggtgtctagtttctttaaatattttggaaatcagccctctgtcagatgtggggttggtgaagatctcgtcccattctataagctgctgtttgtcttattgaccatatcctttgccttatagaagcttctcagtttcaggaggccccatttattgattgttgctctcagtgtctacgctactggtgctatatttaggaagtggtcttctgtgccaatgcgttcaaggctacttcccactttctcttccatcaggttcagtgtagataaatttgtgttgaggtctttgatccatttggacttgagttttgtgcatggtgatatatatggatctatttgcaatcttctacatgtcagcatccagttatgccagcaccatttgttgaagatgctttcttttttccattgtacaattttggcttctttgtcaaaaatcaggtgttcataggtatgtggattaattccagaattaagttaaacaaaaaagtttctgttttgactccttgtttaatgtgttattggacacagtccattatagcaggaaaagcatagtaacatgtgcttgaggcagctattacattggccctgtattcaggaagaaaaggagtgagggaaagagaatgagggtatggagagaaaaagagaagagaggggaggggaaagagaggagagagagaaacacttgtattcaggttgattttttttacccagagtattcagcccaggtcccagtccatgaagtggtgcaaccccgaattcagggcaaaggtttgtcatccctcttgtactaaatctctctgcaaacagcctcatagatacacccaagtatctgagagtgatgctaaatcctgtcaagttgacaatgaaaattgtccataccaattttatcaattaaaatgattttaatgctgccaaaaacaatatcagggtcttcaattcaattccattgattcatatgtctgttgttatgctaatatcaagctgttttttatttctgtagctctatagtagagcttgaagtcaggaatagtgatgcctccagaaattcctttattgtacaggttcgcattggctatcctgggttttttgttttttcatattaagttgagtattgttctgatgggggaagctcttctatgtatgtttatcttattggttgttgaataaagcactgttggccaatagaggagcaagataggtgggacgaggagttgaggagaactttgggaaatgtagtaaagagaagtcttgtgatccaggcaggaagtgacatagcaggcagactcagaatataagcagggacaagtaggaaatcgatctcttcctcctcctctcttctctgtagtcaccatgtaatcaccggcaagagagggcatatgcgaccagcgtcctcaataagataagttcttataaaatatatagattagtagttatggttgataataagactgagctagcagataagaaatcctggtcattggccagcaacattgtacctaatataagtctctgtgtgttattttgagtgcccatgtggcggcagggcttgggcggcttggcagaaagttttatagttacattattccattgaagtctgtgaagaattgtgttgggatttttatggggattgcattgaatctgtagattgcttttggtaaaattaatggcatgatacttgaatctctaagtttctagtgtttacttatttttaaaaataaactataaaatggtaaggtgtagctaacacacacttgtccagtctgtatttctgttaaggaattgccactgggcagtggtggcaccacacctttaatcccagcacttgggaagcagaggcaggcaggtctctgtgagtttgaggccagcctggtctacagagaaagttccaggaaaatgaaggctacacagagaaatcctgtatcaaaaagaaaagaaaagaaacaaaacaaaacaaaacaaaatgttttggtagctgtgtgtgatgttacatgcctgcaatcccagaatttaggaggctgaggtgggagaattgggagttccaggccagcctgaaactagagccttgtctccaaaaaagaaaagcaaatatacaaaattattgccttggtaaatttacccaagatgttaagcactatatgtttgcctttatttagtatttcattcattcaactgatttttgtcagttgtttgtttttggaggtggaaggttctggatcagctccaggtcttgttttcacactggtcaagtattccagcagtgagccacatatattttcctttattttttagttattatgtgtatgtatgcctgtgagtcagggatggcccatgtacatggggtgtgcatggggtggccagagggcaactttgtgaagacaattgtctccttccgtatttatatacatcctaggaatcaaattcaggtcatttcaggcttatacagcaatccatcttgccagccaacaattgcatctgtgtgtgtgtgtgtgtgtgtgtgtgtgtgtgtgtgtgtgtgtgtgttttcagatacccatggaaccaagaggactggatctcctggagctggagttataggtactgtgagacttccattgttggtaaagatgattaaactctggaagcccaggattgcatagtctgatcccaactacaaatagtgaataagccctccactcaagaatccatgctctagtggaagaaataggaagaaattaatggcatggattgtgaaaagagttatggtctggtggccagagtttcatggccaaagacctggctcccagaaccctgtcaagcttggctcagccatctgtctggctgtgccaattaaaaagatgagtaacggtgagaagcagagaggagatttaatcagtgaacactgggaagaggaacaaataaaggggttaatgactccaagttcacctgtcaagtattgacatgagctttaggttcaaatagtgaaagactggaatgtgggggaggtaagaagttggcataattaaacaggtctggtcaaggtttggcccatctgttcatcttgatctcagctctgattgtgcaaggtggtccaaagaagtccttattgcttaaggagatcaatagagtccccaggaattggccctctccaggttgtagccttgccattagaagagaaatgacccctctggggtgggccagtgactgttgtgtgaagccatctctccagcccctgacaggagaacttttggtgcctcttggggatatgagtcaggacattgtaaaaagtcacagtaaggcacctcagttattctgatcattgtgtctttagcttaaagagaaaaaggtgggtaagtttccgcacatatactcctctgggtctttctgatgtctgtgtgcaggaataagcagacagcgccaagtacaggggacagtcacagaatgagggcagagatgctggctttcatcctcccttcagttaccttgtgggccccgtgaggagtcggtgcttattagcagttccagtgcttggtataatcagtgtttgctccaacacgcagcaacagtctctgcacagagactatttgtccttttgttttctgcctggctgcattggggtttgttgactgttcagtatcttcctgcaggattccaccttgtagctgaactttatttgagacaaggtctcaccatgtagcccaggttggtttctaacatatagcagatctcctgtctcagcctcccaagtgttgggattattggcatgtgctactattcccaactgtaactgaatgtaataaatagaccctctggctacaggtaagcagaaggcaggaaagatgaggaagggaatgtcaaactagggagaaagagtaggcagagaagttccatgggagcatgcttttattatttactgaagttttaaggctaaagccaaagttctgtagtcctcatagcttgggctggccagcagtccttatgtggtaataaaggaaaagagctgagaggaaaggaagaaagaaggctttagccagtgtgaccacatgacacgcaacttccggtctcttcaagggctgacaggaactttgagttcttatgggggaaggtagcagaggagaaattgatacctgctaagcaggtgatcttagtctgttgatattctaagccattacatcttagtcacagttctgcaagagttctagagacattttcaccctctgatctcttaagggaagcagcctggttcccaccaagatgattgttcaacatgccaagaagcctcacttcatggggaacagcccctgcttggtagcagcctcatggagggtgaccactctgtggggctcactgttgctgggggtacttatattccttatcataaaaataacgataacttagtcatctccctcttcctagaattaaaggtagctgcagagcagagtgcctcaggaagaaagaagaagctcaagatgcccagaggacagtggagactcaggtaggtcagtgacagggcaatgtggtctcctttagaggcctgatgctttggggggaggaaggcatccaggtgggcttggtctacgggtcccttcactcttgcccacagctcctacttctctagtggaagagaaaggatgtgtcactggagtcaggagttcacacacctggagagctgcactatttctacctgagacatggcgggttgagcaccatgctgctgttcattgctggtctcccacagtcactgaggcaaacccagctcccgacaaggctcttatctaggtatgtaagtccatagaatggtgttagacacctgtgctccagatgcagccatcagggacaagaatgtgaagaccgtaaaatggcggctttcaggccaggtgtggtggtacatgtctgttatcctggcactaaggggacagcggcagcaggattgccgcaagttcaagaccagcttggtccacatacaagttccaggctatcaagggccatataacaagaccctgtctcaccaggtggtggtggcgcacgcctttaatcctagcacttgggaggcagaggcaggcagatctctgtgagttcaagaccagcctggtctacaagagcgagttctaggacagtctccaaagccacagagaaaccctgcctcaaccccccccaaaagaccctgtctcaataacaataacaataataataataataatagctttcagtttttcatagtgagttcaactctaagatcttataatcttatttagccattgagaataactttgattttggtagggttaaataaataaacactatcaatttggagatgatacaccctcacccttaatacctgacctctgtaacagatgggggtggtggcagagatgatgatcatgatggtgatgatgatgagtaggaattacatcatctaggccatggcactgaaggtgtgtgtgggggggggtaagattatatccctctattccttctccttgtaggaatatgggaatatgcttatcagttatataactctattaactattgtatgaggctgttatgttcaaagaaatgaagatgtcatgctggctgctaaatttggatctctaccatgataacaggtcacagctagtttggaggatttttaaattgttattattcatggtatcattatgcttatgataaaacatccttattcttatgcgagactctgggatctagagaaattatgttagcacttatttttctttctattgtgaaaaacagcatttgcagtttctttttcttgaacatggaaaaatttagggcctgggaacaataataagagcatgtctgtgtttttaaaagataaccctgataaccctggggtcagtgttctggatggactggattagaagggagaacataggcacggagagactaattttggacctaactgtattgcttttttcattcatttgttcattcattaattcattcaaaaattctttaggcatatctttaatatatccagtgtagttgtggacaccataacacaacaatgaacaaataaagcacttgccatcttagaactcttcattgtggaaataccttcaacctggcaggaatattgtccatcacttgtcaatatacagcattgatattggcaagtgatggagagaaaagttaaacaggtgagggctggagagatggctcagaggttaagagtactggctgttcttccagaagtcctgagttcaattcccagcacccataaggtggctcacaatcatctgtaatgagatctggtgccctcttatggcctgcaggcatacatgctagcagaacactgtatacataccaaataaatcttaaaaaaaaaagttaaacaggtgagatggagcatgctgggtacatgcagaaaaatgtaattgactcaccactttttagtgtaccattcagtagtattgagtctactcacattggtgtatgatagtccgccagccatctccataactcgttcaggtggagcttttgatagggtgtttgaaggtcctggcaacatacagtctcatgggagcagaagcctgaaggaggtgagagaatgagtcttgtacatcattagacagatgtggtctagcgtccccccccccaagcaacctagactatcatcatagcccagctaagaggtggtacacaaatttactaccacttccagagcttcagtgaggatgggttgggtatttagtttagcgaagaggccaacttaggtccaggcagagacagagaatgcattgctgtcccagttaggcttctgttactgtgatcaaacactgaccaaaagcaacttgaagagggaaggatttagttggcctatgtatccaggtcacagtccattgagggaagctaaagcagacatgaagcagaggccattgtggatggactggatggactgcttactcctcacggcttgctcagcctgctttctttttcttttttctttctttcttttttttttggttttcttagtatgtttaattttttaatattttcttttttattaatttattttttatattccaaaccaacccaagttttcctccctccccacctcccatctgctcctcagagagagtaagtcttccctaggaagtctactaagtctgtcccatcatcttgttgaggcaggaccaaggcacctctctactcccacacccctgtgtctaggctgggcaaagtatctctccatatagaatggactccactaagtcagtttgcattagagttagatcttggacccactgccagtggcctcatatattgtcccagccataccattatcacctatattaagggagtctagtttggtcttatgcagattcccaatttgtcagacccgagtcagtgatctctcactagcttggtcagctgattctgtggttttccccatcatggtcttgactcctttgttcatattgctcaaatatgttcatcgcaacattatttgtaatagccagatcttggaaacaacctagatgcccctcactgaaaaatgattaaagaaaatgtgatatatttacacaatggagtactattcaatggcaagaaacaatgacatcctaacatttgcaggcaaatggagagaactagaaaaaaaaaatcattctgagtgaggcaatccagacccagaaagacaaatatagtatgtacccactcataagtggataccagacataaagcaaaagatacccagcctacaatccacaaccccagagaagctagaaccctcttccagagacagatggaagcagatgcagaaatacacaactaaccattgggccaagctcctggagtgcaatggaagtgagggaggagtaataacatgaactaagaagcctgctttattctacagctcaggacctccttcccaggatggcatcacccagagtgagctgagccctcccacaccaatcattaatcaagaaaatgctcccacagactataggccagtctgatggagacaactcctcagttgagaccccctcttctctgatatgtctaggatggtgtcaagttgacagaaaccaaccaacacgattgctaagcacaagaatgatgtctaaagcatggagaggattttcctgtttatcctaggatttaacatcaaagagcacatggtgataaaggaaaatttatgagacggagaacctaatgtgtttgttccctttctgccgttcttccatcagacatgagccaagactcatgagtttgttttgatttgaaatatgccctttaagcctgttcatacatgttttgcttctgataggagcagttactcatacatttctaaatacattccatttttctgggtacagaaggcaagagggaaatgggcacatctgtacttggtaaacagaaagacctgtagatcaatcagtcaaaaaatgttgtcatttcaggaagccttcaggtgttctgtgagttgtgtccagtgccaagttctgcttgggaaagattaacttgctttggtaatgccatgcaggacttcttgtctcaaagaccccaagggaaataggagagtcaaaaatgacgttgtgtccaccttcgtagtcactcttctgattgtctttctctggaaacttgcagagaagcttgagcatgtttgctttgggtggttgtttattttcttactgatatgaaaaccagtaaaaggaaatggcattgcttcgcccacagggaggatcagccctgtaaatataggcaaaccagcagcataattcagtgtttccttgggggtataacaattgtgaatattttctacaggactgatatggtttagagtaagggttggtacactataaaatatttgggcccagagaccagatgttcctcttataaaaatgctccaggtgccattttgggtgtgaacagcacttcttacaaccacttaccttctggaggtctcatttcacaggtccacagtcttctatatgttgttactgttttttgttgttgttgttgttgttgtttttttaagacagggtctcatgtattccagtctggtattggggacttactatgtacctgaggataaactagaacttctgatcctcctgcctctacttcccagtgctgagattgcaggagtcatacactgtttatgtggtgctgagatcaagccctggaatttacacatgcttagtaagcccctgaccaaccgaacttcattcctagtccttcatctgaaatccttgaactatgaattgtagaattgctaattttttcagaaatatggtaatgcatattattgtaaaatacctttaaggaagactgaaccagtcctctataattcactggttctcaacccgagagtcacaacctctttgggggtcaaacaaccctttcacagggtttgccaaagagcatcagaaagcacagatacttacattatgataaataacagaggcaaaattacagctaagaagtagcagcaaaaataattttatggttggaggtcaccacaacatgaggaactgtattacagggtcacagctttaggaaggctgagaaccactgttaggattaaatatgtggatatgtacccaacagagtgtacaattatttacactcatagaataaggatcgtggtggatttacatcagttcagatcagattttactgccaaattcatttggggcatcaagcttttggtttcagggataaaatattaaaatttcagaattatcttgggaggcaaagggaggcagatttctatgagtttgaggccagatctacaaagcaagttccaggacagctaggactgttttacagagaaaccctcacacacacacacacacacacacacacacacacaccaaacaaacaaacaaacaaaaaacaaaccaaaaccaaaactcagaattgtagtgatgatatcctggacttgtataaaactttaactagggaagcagaagcagaaaattcatgacaagttggagaccaccttggtctacatagtgaattccaggccagccaaaaccctgtctttacaaaatcaaatatttctccaagagctggggctgtatctccaaggcagagtgattaccttaccttcttcaggccatgggtttgatccctggcactgcaatgtaataaatagaaaaatttaaaaaaatctctaagtaactccaaaaaagcaaacaactgtgtgggccaatcccatgagtagcagtgattcagtgaatctacactgagtctttccactgcatgtcctgcacctgagtaatagccaccaggagcagatgaaggttcagataaattgttagcattcaccttctgcccccagcctctgcctctggggtcttggctacctgaagaacaagatgaacacagggatgtaactgtgcaggttgaacctccttaatctgagtatctgatgccaaactttgagtggcacactccttcaatcccagcacttgggagacagaggcaggtggatctctgcaattcaaggccagcctagtctacagagcaagttccaggacagacaggactgttacacagagaaactctgtcccgggaaaaaaaaaaaaaaaaaaaaaaaaaacaacaaccaaaaaaccaaaaccaaaaaccaaaaccaaacaaacaaaaaactttgtgagtgctgatgtggaaacccccatattaaaagtcatgtgggggctggagagaagatggctgagcagtttagggcatgtgttgctcttacagaagacgcggttcaatccccagcatccacatggtagcttacaacagtcccagaggatctgatcttctcttctcaccacacacccacatatacatgcaggcaaaatattcttaaaaataaaatagatacataagaaattaataataaggctgggcggtggtgccacacacctttagtcccagcacttgggaggcagaggcaggtggatctctgtgagttcgaaggccagcctggtctacaagagctagttccaggacagcctccaaagccacagagaaaccctatctcaaaaaacaaaaacaaaaacaaaaatcaataaaaataaaatgacacgtagatgattcctagtcaaaatgaagctgtactagatattgtagaaaattactctcagactatgtataaggtatgtgtggagcaaaacaaatttgttgtttacacctgagtgttatccccaagatgtctcatgatatatatgcaaatattccaaaatctgaccaaaaaatgttggatacaaataatggatcttcagcctgtgctttcctgctatttcctccctgcccaggcctctctggcatcagcatccttccacatataatgaacctatagcaggatgtccttaagtggggagccttagggtaccccagtgggacttgcagggacactagaactgatcagtgtgcttttgctagctgcctgggtaatttttcagaggcaaagccccatggcttgtacccagctaggcagttacaggcaactgatacctcccaagtgagttggaagagatcttgttgcaaaggatcctcagggagttgttgctttgggaaccatgaggtgaggataattaactcagctacatgttttggcaactccagttttacacacaaccttttacagatatggcgacctaacagttgctagacccatctgacacatttcttcttttggaagactagtagtgcttgtggctgctctaactgaggagagagtgaggaccatgctctctcaacaggccacatactgagcaacctgtgctctgtctcctgggattccaattggccagtaccatgcacagctacctggacagtgaggtttggaagatggcatggaaaccaggtgagctttttgttgttgttgttgttgtttggtttttcacaatgagggctttaaatactgaaggaacaaaagaatataaacaggagtgttataccatatcaagtcaagagatttattaattctgatttattcatctagcaaattatataacccatagaacccatgctttgtgctgttttgccagatatgagctctatctacagagtttaggcttgtatgccatgtttggggtatgtatgtgggtgtgtgcctatgtgacaaagggaacttctggagcacaagacaaaggacaagccgacagagaagcagacagccagtgagatggagagaatccgaaggatggagtgcgtgagaaccaacacacatggtgggatcatgggaatcgataaactgagaggagttagacgatttttattggtagattgggcaggagggcaccttaggaagagcatccttctaaacaaaacaaaacaaaaacaagagtccaggccggaagaaatacattgtctagataagcactagaaaaaaaagttcactgagttgttttgtatcctgagtgccaggctaaagtcctctcctttcaggacagcaaaaaaagaggtctaacctggagaaccctttcaaagaaattcaagctgatcatgatatcactgtgggaaagagcccttccactgtgtggaagcctgaatcccacaggttacactaggagagcaaggagaatgagaggctgacaggagagagatttcaatggaagccttgtactagctgctgactgagtaaggtcacaagtgggtcagcaggatgcctctgcctgtaaggatggacatccgcagcaggagtcagtgtgaagggtgtgtgctggttcatgaaaatcaaagccctaaaggaagtgtggctcagcctcagcattgcccagggttctggatctttcccctgaagttccttctcagggcagagcaggtcagatggttgtagatgactgtgtgccagctggagatagttgtaaatggctggagcagtttgggctatagcttggtggttcaattcctaatacccaaaacaatcaaacaatacaaaacaggatggagcagtttttaaaaaggcaatagcaagatacctgttttcaaacactttgccttgggttttcttatttttaagttgttgctactgaagagttcctttttttcttcttgtttgctggttggttagttttggcatggtatcccactgtcacccacgatggtcttgaatttgaatcctccacctcagtttccttagtggttgggattatagggactacaggtgtgtgcattgcacctggcttgctgttaaacatgagaattttgtcatcagttcgcatgctttcttaacctcagtttcttgttacaggaatagtgtaccaattaaatactcattaaatagaagccattattttggttgcatccctaataggtccactattacccaagcataataagcatgtgttcaattcagttgtatctctgcccctaatttcattattggactacagtaaagattgctagttgtaattaatatcaagcagttatagtattgttcattagttttgagcataatgagtgtgcttgattttaaattagatcttaccagaaacgatgtcttcttttctgcaaaagcacccaatcactgtactcatactgttgtgtaacaaaacatttcctggggagacacagcacacacatctatttaccccagatagaagcctatggcagagcaaagtacagataccaccaaagtcaaacttggagagccagtgggttttattggggttacttacaggagtatgggtgaggggtcacttacaagatcagaaaccactcaaagacacctgcatcccaaggcccaccccagcttacacaagctgggaaacctggagcatacttcacagcctgcaggcagctcaacaggttggagagtgtcctttccaagaaacctcttccaggcagctcaactacttcctgcttcttccaggtagctggtctgagtctttttttttttttttttttttccagcctggcccagaactgcttcatagaaggtttaaattgagggctgctgtgtatagtacacagttgttctcaaagcacctgggaggctgaagcaggagaattgagagtttgagaccagcctgaattttacagaaagaccctatcttggggaataaagacaacacagcataatagagtaggcaaaaatttgtgttaaaaaggatcacaatcaccttcaacccagtggctgctgagtatggaaaagagagcagccctggttatggctcttgactttcttcccagcactgactggtgctgcagcttgcctcttcacaggctgctcagagaaggtggaaggtaggcttttggctgctgagcttcctctgtgaaaggaagaccccaggctattccagatctactagccccaccctacagccagacaggtatggctgggatggagccagtacaagaacactgaaagggtcctcgaaatcacatgacctccacacacttggctgacctatttcttagagccacagctggctccattccatctttaggaagtgctgggatctcatggccacagcctttccctgggtcccctttgagatctcttccatttcactaaggtaactgcactgaccagacagattcttagtctattccatgtttattttactttggatattgaatttttgtttattcttgtgcttacttctgcaatgctggggattaaacctagtgacttatcaatactttgtcagtgacctacatcctgagcctcacttttcccttttcaattaaatttaaagttgttcttgaaatgtgcaggccagttttcaccacttctcccctcacccatccaaccccctccctatccatagaactactattgccaaattgctaagctgctctttttttttttttttctctcgagacagggcttactctgtgtagctttggagcatatcctggcacttgctctggagaccagggtagcctcaaactcacagagatccgcctgcctctgcctcctgagtgctgggattaaaggcgtgcgccaccaatgcctggctgcctttctagctcttttctgctaatttaaacatatgtgttgtggttggaatgtacagtgtcttcccctgattatgtgaattctaggaattgaacttgggacttctggaagaacaaacagcgagtgttcttaatcatgagccatttccctaggtcctcatgtgttcattttactacatcctcccaagtctactgagaggtgatgtatatgggttttgcatctatcaaatattatataatatctttagggatggttgaggcagagtctcatgtaactcagtctggtcttgaagcagaggatgggcttgaactcctgattctatgctgtagcctctgctgctttcccagttctgggattataggcctgtaccatcatgcctagttatataatagcatcttatatgttaaaatgctagcttttaggatagagtaacaaaacttgtaaagttaaagcttaaaagaaactaaagtgttaggtatgtaacttctgttaatgaaacacccattttggaagcaaaacaaacctctgaatattccatatagaaactgtcctgggggttcacaggacattcattaggtgttccatgcctcatgacctgagtttgatccccaagacccatgtggtggaaggatacagattggcctctgacctaaacacattcacccacatacacactaaagaaatataatttaaaaaattgaaagatccaggcatagtaggcatctaactcagcactcaggcctcaaactcacaaagatctgcttgcttttgcctcctcaatgggaatttaacattattttattccttactatagaaatgagtaacttggattttgtttgtttgtttgttttttgacatgggtttctcagtgtaacagccctggctatcctgaaactcactttgcaaaacagagagccacctgcctctgcctctgcctcctgaatgctgggattataaaggcatgcaccaccatgcccatcaacttggattttgttgttattgttgttactcttttccctcctcttttggtcaaagggtgaggagattgtatagtttaggaccatagaggcatcaactagcaaagtcaaaaagaggaacaagggtcctttctggtgctgtagagtaccccagtgcctgctagggaggtagtcctgtcaggatgaatgccctctttccccttcttgtctgtccagcttgtatgtaaagcacagtatcgagtctagttcctcagggaacagggcataacagctctctgtcaccagaggcaacagacagggctttgtcccccagatgggctccctggcttcctcagaactgcctcggtgtcttgacaaggagggaggcagcgctgtgctatgatcagaactcagagttcacgacccccttttcatggcactgcccttgttacccacggaagtggctcctcttattttttctgagctaatttaaaaatgttgtcttcagagtagaagtgtttattagttactgagagggcagtgttgctgctgtcagaacccacagacaaaggagtgcatacatgtccccagcagagagagtgggtgacgagacacaatgttactgccagttgccatctatgtcaggcaatagcccttccatcctacccgaataccttcgaataccttcgcagaaagacccaagctctgttggaaatgcccacttcattgatgatacagaaagaaattcaacagatgttttcatttggtgttgtgtctgtgaataaatacaagtatgccactctcacactcgaagtaacaacagcagccccacccatgaaaccaaaacaatacaaataaatcatttaaaacttttttgggtgtttctctgtgtgtggcatatgtatgttctttctttctttctttctttctttctttctttctttctttctttctttctttctttctttctttctccgtgacaggatttctctgtggctttcttttcaggctgttccgaaactagcttttcagactggtcttgaactcacagagatctgccggcctctgcctcccgagtgctgggattaaaggcgtgcgccaccaccgcctggcttccactttgtttttcaagacagggtctctctctctcactgactagacaacttaccagctggctagactggatggccaatttattccagggtctatctaccttctcctacccctagcactggggatgctggggctccaaacgcagattctcatatttgccagtagactgaagtatcttctcagcattccattttattgctgttccctaaattttcgttaacttagagtacataaaatcccagacttgttatgcagctaacaatgactttgaacttctgttccttaggcctccccatcctaagtggtagggactgaaccaaagtctcacacatactagtagacactctaccagcctagctgtatccccagccatagattaattaatatatattatattacatatagtatattatatctattatatataaatatatctaagtaaatatatattaatgttccccctttccgggactggacaagttatacttattccctagggtaatcaacggtgactctaccactgagctgcatgaataattcttttcaatggttcatatgattgaatgaagatacaaacaagatttataaatcacatttctccaatagggttcaaattttttttttaaagattttattattttagcagggtatgatggtgtagacctttaatcctagcatttgagaggcagaggcaggagtagttctgtggtttggaggccagcctggtgtacatagtgaattctggatatccagaactgcaatagagaccctgttgtgtttgtgttgtctcaaaaaaaaaaaaaaacaacacaaaacaatttttatttatttttattcatgtgcatatctgtgcacatgtatgccacctgtgtgtcctggtttacaaacaatttcctgatttggtgatacaaactgaaaccatatcctctggaagaacagtacactcttgaccactgagctctcactccaggtctgaatttgaatggtttaatctgtgggcttctcctctatctgttttaatatcttactatttgttgaggaaatgtgatctgttctttagcccaaatacagcattgggaatacatgtgtgctgtggtggtttgaaagaaaatggcccccaataggagtggcattgttgggaggtgaggctttgttggaggaagtgaatcgctgagagggtgggatttgaggttctctatgctcaggatattacccgcccagtgtctcaggtgacttcctgttccctgcaaggcaggaatatagccagcaccacatctgcctgcatgctaccatgcaccctgccatgatgataatggattgaacctctgcaactttaagggagcccccccaattaaatgctttactttgtaagagttgccgtggtcatggtgtcttttcacagcaataaaacccctaagatttatgccaaatatttttatatgggagctgaagatctgaacttaggtctaatacttacacagcaagtgttcttgcctgctgaaccatctccctaggctacgctctgtctgtctgtctgtctgtctgtctctctctctctctctctctctctctctctctctctctctctcttaaactattattgctctgtgtgtgtgtgtgtgtgtgtgtgtgtgtgtgtgtgtgtgtgtgtgtgtctttgcagggtgtgcatgtggagataaagaacaacttggtttgctcctaccatggggccctgggatggaactcgggtcatcagattgaatagcaagtgttttttacctactgagccccctcacctcagcagtctcagttttgttctgttttgggaaacatgtagttcaggcaggcaggccttgaactggccatgcagccatgatcttgaacttctgattctttgtaccttcctagttctgggaccacaggtgtgtgcaccacacctgacttttttttttttttttcctctttacccattggtatattcctaaggaaagtaaagacaaataataatgtttaaagtcaccagaaataatttcatttttataactgaactaagctggtagctatattcattcgttacattttactcttttttggggtggtggtggtagggccaagttgagataggtcttgaaggggtgtttgcagatgtccaggtagggaagtgaatttcaaagagatgagaatgaaaactccattcagattgacttcatcaacctggatcaagacttctaaagagtctgatgccaggtagttcactgccagcatatttaaaatgcagcacaatttggaaaacaagttgcccagtgtaatgcaatcaccagtgcacaaggaagcataattacattgaaactcagggtacatgtcatttcttccaagaagatgggttctagagatactctatctgcgatagcttaagggcctagtgaaggatctggactgttctccaccacacagatagagtagaggtcatttgggccattagctgcctctgggcctggttgtcagagcctgggggagcctctggctattcagataatttaaggatcatttagatgatcaggtatcttcatcctggttgtgggagcttggggagcccttggctgtgagggtcatttaggttactagccgcctctgggcctggttgtaggagcttgagatggcctgggctagcagataacacagatcaccagactattgatcacttccaattctcagctttctggatggaagaacaggttttgtttgtttgtttatcatctttcccattggaaagacaatcctgtgtgccaaatattcctggcttctctggagatccatgggcataggtgaaaggttcaggcattatgctggcctgcccctgttacctggtggaatccactcaggcaataccctggtcagcccaaggttccatgggaaagaagtctgcacgcaggtgcagaggacccctttaaaagataggctctctgcccctttactctctgtctctctctgtctgtccctttctctctctctctctgcccctttacgctcgcgctatctctctctctccccctgttcctgctctctgtcccctctctctgtttccccgctctgtctctctatggcgaccggccatggcggtcagccatttacccctgttcctcttcttagtctccccattctaccgggccttataataaacttatagtcaatatgtctgtctcaatatttctcttttcttctttttaaacaaaagaataacattttggcacccaacgtggaaaggctctgcccttataccttctgcgacctgctggctcgagacccgctggtgggcgcgtgttaggcaagggcaaccttacaacccactttcatctccgcttttcctggtactccctcctgcctgcagcagcctgagatgccggaattcaacttgccgatttttcaactaagtatttctggaactcactgatctgcctattcgctacaatccggtaagaaacccaaaccgttcctatggggcagacccagcgctgttcaatctgggtccatttttcggtttcgggccgggtgctctcagacagggcaatctgtacatttttcggccttgcccacgggaaatacatttttacgggatctttcggttattggcagcaaataggtaaattagcggagttctgcctcccagtgggaactttctttcacctgggaatgtccctgattgttctatttctgactgtttcttcttggttggcaatgtctgcttgagacgctctaagagtttttgtttgtttgctggttttcattttgtttgtttactggtttgaaacttttctggcaattgagaatgtgcttatgggggtcgccacctcgaccacgtgtgctaacctgggggccgccatcttggtcataaccatgtgacctagcttaggcctacccactcacttcaagcactgccacctgacatcttgctttttatttctttcacttgttgggtgcatttcctaaaggtcaggcatgggatcccgctccaggagcggtgcttttttgcttttttcagttcggactgctgggtcctttttcggtttcgggacagctgtgtccccttcggggccaggcccctggcaactcccacgggcagacgtgcatccgtagaggagctttttgccggttccccacctgcctcacccatgggaaatgcatagaggaacctttctggtttcatccaacaagcaggtaaaaagacaaaagcggtttacggttgccgccgttttggtcatgtgacctacctgtaggcacgcccagctccagcggcctatccagcaaacctgtctgccggattttttatttctgccagatctttttgctttttattttattttttgtctatgatttcttctttcactggctctgttgttcatggcttgtttactaaatactgtgcctttccagggccctctgtttaagtctactctgtccctttaaatctcctgtctgtttgctacaatgtacggatcagagattacattctgattccccctttactgttatccagtcctgcttgtctctgtacctgtaatttaactttatacttatctagcttatatacaatttaaattaaactatactaagtcttatatttctaaattgctatatatctttaaatgatggtaaacatttaaggtcataaaggtataatttaactatacttaaaatataagctaagtctatacaacttaaatttaactcttgtatctttaaatgatgatgaaaatttaaaattataaagatctatttcaaattaacaaaatatttataccactcagtttatcctgtaagccgtttacaaaggcacagcttttattacaaaaaagggatttttctctaactaaagacaaacttaactactaagatcctaagcagacagccctcaaatgctcagagatctatagaatatggcatttaaaatgttttgttaaaaagctttttataacagagagataggccagctgctggccccaccccatttcctccgagaagactgggcactgaagaaacttcgtctcgagtcagtgacaatgctggtcactgagcaaccctgcccttcacctcaactactacaaagtattccagaccatggacaagagaacgatggaatcgactttcccggcgttgcttgggccaacggtaggcgagtcttcccaaagtctctaatccacaggtcgcaagttatcagcaagaaggcaggtgtcctgcagcccactactatggatggaggaccttggggatggctgtccatacagcctgctggcaagtctctgttattctttaatcattgattcaggtaaaatcttatccttctcaagaactctgatgcttttgacgactgatagtcttgccagcttaaagcaaaacagattccaataacaggtattttagggtttatctatgtaaagataggaaagtctaagatgtataaaggtctaaaaatgtagttacgaaggcctgaggatataaaggcttaaatggtgataaaatgagttgagacattaaaaagaataaaatatgttcctgatttctctatttctcatgctactgttcatattaaagttcaacaataccactatatgatcataactacaaggtcaagattaagatgcttttcattgtcctaaaaaaatctgtctatttttaaatggtaatactttcagccaagttgcttctaacatgaatgtgctactaatgtgtctaatacttatgtttccacaaactctaaggattcttataagttccagggagccgaatcagatccaaacaggtcagattcactccaggtaatattcaacctttccccggtcccaaattctcttcactcatcttgggactcctcggatacccctccctcatcttacaatcttcccctcaagtgacaggacctaagaaaaaaatttttctaaactcaaccttgttttctgctctgtcaacatcttgccaggtctaagaggcgccagggagttccatacagcttggactacaatgaaacaaccagcttccccaggacgtggcaacaccccaaccttctcgggtcccccaaagatggtcaacgcccccacgtcagcaggaagcagtcttaagaattcgacgcccttattccttaacctgccatgtctaaacaccccaccttttttaataataagtagaggtgggaatgaaaggttcaggcattatgctggcctgcccctgttacctggtggaatccactcaggcaataccctggtcagcccaaggttccatgggaaagaagtctgcacgcaggtgcagaggacccctttaaaagataggctctctgcccctttactctctgtctctctctgtctgtccctttctctctctctctctgcccctttacgctcgcgctatctctctctctccccctgttcctgctctctgtcccctctctctgtttccccgctctgtctctctatggcgaccggccatggcggtcagccatttacccctgttcctcttcttagtctccccattctaccgggccttataataaacttataatcttatgtctgtctcaatatttctcttttcttctttttaaacaaaagaataacaataggacctttgtgctatgctcagcagggtgtccggctaacaactgtttgtaactctacttccaagggatcatggcctcttctagcctctggcagtaccaggcatgcacataggcacagatatacatgcagataaaacaaccatacatattaaatacaaacataaataatttaaaacacagacacatacacacacaaagttggacatggcagtactcacccattatttcagcatttgagaggctgaggcaggaggattaccccatttgaagccagccagaattgcttgagaagtaccaggcccacaagggtcaaattcatgtataggtgttttccctttcttagtaaacagtggcacagtaagtacacttttattcgcctaacagttggctcgtgttcatttttttcttacaatgatactatgcttcaggctcgattttcctatgcctctgggcggatgtgtttgtacaggtcagataccaacctacaggactgtcctgttcctcagttgctgccatattggtttctgagacagggtctctcatcttccagtggttagtaaatctgggagatctgtctccccagctctgggatcacaaacctgtgctactacttccaacttttctctctccgtccctcccttcctatagagagtctcaattgattccattacttctagagaagggtttttggggagagaatgcattctcatgcgaagttgccctaagtgaatcgcagcatccttagcagggttattaaaaagcagatgtagccctgcctgccctggaccttccgatatgtaccaggctggattcaaatttacagattttacctctgccgcgtgctggaattaaaggcgttcaccaccttgccctggactcctgactttttttgtgggttttggggattgaaccccagtctcaatcttcctcttcgccatcatttgttaggtatccctggaaatctaacctaaataaacttgagttttaggaaaagtacagttaattgattccattacttctagtaaaggttttttgtttttttttttttttgcggggggtgggggaactgcatcctgcacaggtttttgaaaaagcatactaaagtacttaaagtcgcaacccagtggacagatcggtatcatagcgtgctttcacatcggtaaccgtcaccatcttcagattttacagttccaaaccgaagctctgtatctcgtaatcttccaaagatttttagcagggctagcttaactggaaggcgcacttgcgccccaggtgcagccgtgggcaccgggagcattcctccttcccagcggattctccacgtgactaagcaggctccgggtttagcgctccgccctcacctattgtcccaggagaggaaccggtatttccggattagagcctcagacccagtgatccagggtgagggcgaggttgaagggggaggggagtggaaattgatcttaaaacttatctttcatctgtttctcttcttccccaaacaaaaaaatcaaccctctcccctcccctaccaaatacacacaatggcccacaaacatccacccagtggttttaaaaggttggccgagttttccttgcccatacccgagagagaactgaagtcagatctggacatgaatcaatagaccccgagaatggttttcgagccggaagctcagggggttttgctgagaagggaagaggcccaagcgtcactcagtccctgccccaccgctgggtggcgccggtgagaccttcgccccctcccatcccgacgtcccgaagtggcgcgagccgaagtagcctctttttttttccgggtccggaggaagcaggtgacggccgccgcccacctaccctccccctaacaacacatactttcgataggcacttttttctttctcctaaacctccaaacaggaaataggttgagtcacaggagcagccggtggccgaggtcactggctcccgcctgctggggcagcccgtggcaccccgcctccggaccaggcgctgcccgcgccgcgccacccaacgccggggaccgtcgcctcgctgtacgctgactctgctggctgccgccgcccgccttctccaggcgagtacctgcctccctggccctctcggggtgcaagattgcgctggagccgggatccgccgcggggcagtgtgcgtggacgcgggctcttcctgtggggcttggaatgtgatttattgagcgttgctttctgcctgcttccatctcccacccctgggcagactggcatcataggggttgatttagggacacccgggacctgagtgtacgccactgctacaggtgcctggctcttccttgtccttccatgccggagcattgtttcactcctgcagaaggcctttgggtttctgttggcagtgatggtatctaaggggtgggtggcctggatggacgcggcaggagaaggctggtgactgggtgcatgtgggggcgatccaggcggccatgtgtctccccacgccgcgtactggaaaacttgtgaaacatttaataagtgtgtgtatacttggggtcgtccgacccacttgtaagggaggagcagggttgtcaacacgcagggcgttgtcaagctctccagggctgctttccacggctcttctttgggactctcagtcaaagccgagttggagatctttatgttggaaaaaggccactgaatgccaagcattccccgagcttgagaagggtgttttccagagtgctgcagttagcaagaaggtttctgagctactgtctcttggttgcccgtggcgccttcccagaccacaggtgtgcgcgttctgctgagaggctacccaggcctttcaaagttttcctacttgtctaattcatttgaaagaaccgttccctggtaaggatcctgggacattgcttgggggcctcttgaaaacccaggtctgaggccgcaccctagtcctgttaccccgggatctatttgcactttgacctttgggaacctttggctccccgtgtctccaagaaaagttgccggtgccaagcaaaggaatgattcacaccacattcccacccagtcttagatttgaatgctattttaaaagtggggacagacagtacagcttcattggacctgcccactccaccccagagtgattggtgctttgttcagattggaaaatatttggctagcatataatcttgcaggttgtttgtggatttaaattttttccagcaaatatacagaacgtgaaattgagcattttaatgttaaatacacaattaggtgtcatcaaatacacttagatttattcagggtactgagaatgctgactagaaatgtaaggcaaaactagagtaggtaggcataatagaaacaagtgtcccagtgtctctgagtggacaaggcaggatagtagcaggattctgaggtgtgctttctattaatgaagacaaagagccaggaggtttctttggtttaggctgccatagaatggagtcaccctgggctttcaacctgcaccagttaaccaattattaatacaggtgatctctaattcctcatcccctagatactgagaaatgaatttgcacttagaagaaaaatacttagagtttggtggtgctcgcctttaatcccagcacttagaagacaaaggcaggatgatccctgtgagggcaagggcagcctggtctatgtagcaaactccaggccagccaaggctgcacagtgagaccctgtctcaaaacaaaaacaaaaacaaatcctttttgtttatttattgggtgtgtgagagtgtgagggtatatgtgtgggcttacatgccagggtgctcctgtggaagttaggggtcagctctgtggagtctgttttctccttctaccttgtgggtcttgggggtggaactaccgcctcatacttggctgcaagtacctttgtccatgtcctgacaccgtgtgtgtgtgtgtgtgtgtgtgtgtgtgtgtgtgtgtgtgtgatgtgcatgctgtatgtacctgtggaagctggaggttgacatctggtggcttcctcagttgccccccaccttatgtattgagacagtgtctctcacttgaacccagagtctgatgatttggtagtctggctagctggcttgctcagaggatccctgtcttagcttcccagctgagatcacaggttagcccccacaccagcccgacatttactgtcacaagtgaagtttgaatggaaagtgctgtatccactgagctgtcatctccccagttccttctcttccttccttccctccttccttccttcctttcttttcctcttttatgtgaattggtgttttgcctgtattccgtctgtgcaccatgatctgtgtagcgcaagggggcattgtatccattggaattaggtttggggactcaaacctgggtcttctggaagaacagcgcccgtgggagcactgggacatggcttcaacactccctccttcagtctttcatcactgactccagctaagttttgaaagttatagttcaaatgaactttgagaaaaaggtctctacaaatattggagccacaacaagacttgagggggataaaaaaggtttgatataaattttcaaaatgcttcaacctgttttatttttaaaaattatatacacacgtacatacatgcatacataatacatgcatatatattttttttgagacaggatttctctgtgtagccttggctgtcctggaacactctctgtagaccaggtttgcctcaaactcagaggtccacctacctttgtctcccaagcgctgtctcccaagtgctggtattaaaggcatccaccaccacctggcctatatatatattacatatatgttgtgttgttgttttgtttattccagacagggtttctctgtggctttggaggctgtcctggaacttactctgtagatcaggctggcctcaaactcagagatccacctgcctccgagtgttgggactaaagatgtgagccaccaccgcccggcctaaaatatatttttaaaagatttattttatgtttgagtatgtgtctttttgtgggtatgtacccgactagaccagaagagggcatcggatcccctggaactggagtttcaggtgtttgtgagctgattggctgggtgctggaaatcaacttccaggagcaggagcaagcaagcacttccaactctgagctccagtcccttagttttaatgttcagtgtgatgttccaatagcaccatccatagttgtaagaatgtttctatagctgagaaaaactttgcagtgatgtgttatttgtttccagttgttaaaatgtccggttggtggtttgaggaacagggttcagaagtcattgtgatagatcaagagcatgactcagaacacagccggcctgggactgggtattgggcagtttaataaataactgcacagtgccaggtcctccatacaggctctttcttctttctgaagcctcatgactgagtgtgttgagactgtcatctgaaggaggtgatcacacagaggaaggaatttacagcttcctttgattgaaaagcccctttgaaattgttgacgataactcagccaagatctagccagaaagttccctctgaagaggattcctgaattcacagagttccaaacctctaattttttttttaacttccagcaaggcaaaatggaacggattttcccttttttcctagagtgtcttttgagatacactgtagttttgttttatctagtatcaaacactcttttgcagtccacagagagggggaaaaatccttaggaaaaaacacccaaggaataatttttattaagaatgaaaacttgccaactatttgactcactaaatcagttttaagtattggaatatgtaggtttagacacctgtagtggttctattatataaacaggcttgggagtcatttggataattgcacacgtaaacacacctcaaacagacatgcaaaataaaatattgcttgtttgttttttaagttaaaacatttgtcgggcagtggtggtgcacacctttaatcccagcactcgggaggcagaggcaggcagatctctgtgagttccagaccagcctggtctgtaagagctagttccaggacagcctccaaagccacagagaaaccctgtcttgaaccccgcccccccaaaagctgaaaacatttgtattatttatttttatgtgtgggccttttgcccacatacatatctgtgcaccacatgagtttagtgccctcagaggtcagaagagggcagatggtgcacagacatacattcggacaaaacacccataccaaaagcacacaaaacaacatcaataataataacaaagattaaaaaaaaatcagagcttgccacttgtactcagcactttttttctcttcctcttcctgttctgctattcctttcttttttcttctttttctgcaacaagctcactctttatagacacagctgtcctagaactcactttatagaacaggttggtatcaaactcacatttccctgcttctgcctccccagtgctgggattaaaggcatctgccaccacgccaggcccctttcttttttctaaatgaatgcctctttctttatactggtcttcatggagatttggaagactggtttctccattggaaagaataaagtgctttgatttagtgtcagtaaacatttggtgatgacccattgtaagctagagatttctgaatatattgtgatccaatcttgacaaccgccccagagggtcctccctcccacgtgccctccttcctccttcccttcctccctccttcccttcctccccaacagaaattgaggtcaccctgatcttctcacttgaaaccatggttcttttcatcctccatacatgtaaaattagaagtgtttggttgctgttcccacttactgccaggaagctagacatccattcattcttcatctgaatcttctggaataacagattctgtatcaggcattgaagtcaattaaaaaaaagcagaagtaaattccaaaggagcaaagcgtttttttgctggcacccaatacctctgatggcttagattacgctttcactcaacagtgtcattaatatatccaggctagtgcttggcaaaccggctctggggcacttttattactgacatgggtcaataatgttattcttgcatgccagcctgaaggtactatctggtactccaaaaatgtagcctacctacacatagctggatgtggtggttcacctgtaatcccatcacacctgagctaggctggaggatgtggatttctttactggtctggagtacgtagcagagctgacctctacttcctagatgagccaacaggagcatatatcacagactcagggctgctgcatgcctgtgtgtaaaattagaggaataattatccccttccaggattgtagtgaggcctcaaaaaactcttacgtgtaaaagtgcttgtaaactgtaaagtggtaacaaaagctgcctattagctccatttgggagggatttataatgaaaaggagatagaaaaagccacacagctgcctcacactctttaatttatctagcactttttcagttaacaagtctgtttgtaattctctcggtagatttacgccaattaaaaagctttttttttttttttttttttttttttttaagagctgggcatggtggcacatgtctttaatcccagcaaaggctggcagatttccgagtttgagtctaacctggtctacataggactgccaggcttacataatgagacactgcaaagagagagagagagagagagagagagagtgcaattttatggagatgatgtaccatccaattcacctattgcaatgcataattcagtgtatattcattgtataattattgtgatgttcaattttagaacatttgtctgcctaaaaagaacaccttctatttgttggctggcatgagtcagtgtccttccccaaatgtcccaaggtagccattggtctttgtcttagttagggtttctattgctgagatgaaataccattaccaaaagcaagctggggaggatttatttggcttacacttttctatcactgttcaccaaaagcagtgagtgagggaactcaagcagtgcaggaaactggaggcaggaggcagaggccatggaggtgtgttgtttcctggcttgctcctcatgacttgctcagcctgctttcttatagaacccaggaccaccagccctgggatgacaccacccacaatggactgggccctcccccatgaatcattaattaataccctataggcttgcctatagcctgatcttattgaggcattttctcaattgaggctccctcctctccagtgactctttatcttgtgtcaagttgacataaaactagccaggacagtctttctgttcatagattcacctatctcaggcatttttaattttaaatttgtttttgttttgttttatggtttttcaaaaacagggtttctctttgtaacagccctggctgtcttggaactcactttgtagaccaggctggcctcaaactgcagaggcagagatcagcctgcctctgcctccttcagtgttggtattgaaggcaagcactaccactgccaggacctgtttgtttgttgtttgagatagggtctcactatgttgaccagtctggccttgaactcttagcaattctcctgcctctgcctccaaagtgctgggattacattcaggagccactgcacttggctaccagacagtttttataaatgagattatacaacatatagtccttcatgttggcttcttttatttagcctgaattttcaaggtttatcctgttcctaccttttggtagagctggagattgagctctgggcttcacccatgctagtcagtgttctaccactgagttatatacctggccccacttgatttctttttattgatgattaatgatgataattatgtagatacacattttgacatccattcatctacattttggctagaatgaataatggtactgtgaacattcatgtagaagttttcatataaacatacatttgtatttattcttgggtctactagaagtggaaaatctgtggcaagtctattgaatattaggatctgttaagctggtttccgtagcagctgcatcattctatcagtaccagccatgtaagctgactctgttctttgcatctttatacacttgaactgctataattttctgtagggtgtgtgtgtgtgtgtgtgtgtgtgtgtgtgtgtgtgtgtgtgtgttgtaagtatgtatgtgttcctgtgggtgcgtagcatgtagagccagaggttggtttcaggtgtcttcttctattactttccaccttatttttttttaaaatgattaatttattattattttatgtgtatgggtgttttgcctggatgtaagtacatcactgcatacaatgccattggagactggaaaagtgcattggatcccttggaactggagttatatgttgttgtgagctactgtgtgggtgctggaaacggtacttgggtcctctgaaagaacagaggctcttaacctcagccatctctccagcctctccatcttattttgtatttttttcccccactatatttctttatttgtttttgagacagagtctttctctggacctggaactcatagattcagttaaactcgctggccaatgagctctaaggatctgcctgtctctgcatcacccagccctgaggttacagacagatacttcactgccagatacttcactgcctgcgttgtatatgggtgctggagatccaaactcaggtcctcatttctctccccctccccccccaacccccccccccccgtgtgtgtgtgtgtgtgtgtgtgtgtgttatgtgtgtgtgttttccattttctgtggttttaatttgagctctcttaacttggcatggaatggttttgatttatatttctctgatagctaatgatgcttattatctttttttaatatttacttgtttttggagaggatggtagggtagggtaactctattatgtagccctggattcctggaacatttctgtgcagaccagtctagccttgaactcacagagatctgtcctctctccccctcaagtgctaagattggcctccaattcatatatagatgagaatgactttgatcttctgggtcttctgcatctacctccccaagtgctgggtttacaggcatgttctacggaatgcatgcctggttcatgtgctggagactgaaccccaggctttgtgtgtgatctttccagtaaataatatcactagctactcaagtgtttcttagattgttttttcttggcattttttcccccttgaaaattagataaagaagaaaacccattttgaatagattctttgttgaagtgtaagtaattattttattttgtttaacatttcatttacttcaagacctgatgtagtacctgatcttcccaaagatttgaccaaaaggttaatgaacacacagagcatctttgcagtgtgtatttgcatgggtaagcaaggacatattctatgggctgactcagtgtctataaaaatattgtgcacctgtcttagggtcactattgctgtgataaaagataatgacaaaagtaagctggggaggaaagggtttattcagcttacacttcatagttcaccatcaatggaagtcaggataggaacccaagcagggcaggagtctggggacagcaaaggtcatggaggagtgctgtctactgacttgctccccatggcttgctcagactactttttatagcactcaagaccaccagcggagggatggaactacccacaatgggctgggtcctcccccaccaatcaccaattaagactgcctatagcccagtcttatggaggcattttctctattgaggttctttcttctcaaatgactttagtttgtgtaaagttgaggtaaaactatccagcatgacacccattcaaatgttaacattataggtggtgaccatttaaaacattttaatggggatgggaacttgaaatttttaaaaatgtaaaagtttaataaaagtactttttaaattctacttattaaaacttacagtgaggctggggctgtagctcagtggtagggtgtgtgctcaaggccttgcttgatgagtcttggtggtacacagctccatcccagcacatgggaggttggaggctggaaaatggagagttcaagggccagcctggacttcagggtgagatcctatctcacacaaaacaaaacaaaaacccaacaccaaaaaaaataataataaaataaaataaacaacccttacactgttatactttagaatcctgttaatacaatttattgaagggtatctagaatcgagtgcccccaggagagaagttagcatatttgttatttcccaagcttcctggcgggggttctttcctctgctgtgtggaacatgaattatcttcaagttgtataatcaaaaatcagtattgagtttcctggttgtctgttgtgttttatgggggcttcgtttattgaattcaggttttgatttcctactagaagaatagagaaattagctggatttggtgggagagagttatttcctattgagaactgcctgggacagtggtggtggactgacttgtggacaacagtgcagggtgttctcaaacattaatgtgtgtctgtagcacgggagagttggggtaaaacacaggcctttgactaagggagtctgagaattgatgtctctagcaagcccgtgcccaggacagatggtgtggttgacaaaacaggggagcttctaggccgagagccaatggtttgtgggcatttggcagtaggatcggagtgcgtgagatggtaaagctaggggatggttgggctcctggcattcaggtgtttggtagcatcatgagcattatggaggtagggcacaaaaaggtcccaacaactgggtgcagggagggggcctggaagggagaacaggggtttccaaggcagtagaggtaactgacagacagagggtgtgacatgaccaaagcagccagcatctgctaggtcctctaaattcaggagactgagaaacctgggtggtactggtttcaggggagggtttgagctgccatcaggtgacaggtttggggtatgtaggtcctgtcttcccagcactacttctggaaggcacacattaccaagggtccagttgagcagcttacagtcccaggtcaagtgtggactttactttctgatatagagggccctcttgtccttcaggcgatagtcccaggactcagggatgactcctgcctaccatcgctgactggaaccgaggtgaacttttggatcccgttgtgtacatggtgtctacatcactaagacccactcccctcctggcctgtgcagcttaatagctttaaagatttgtgcagccctgggcccagggttcttagcataactggatataagccgattctgagagtgggtgctgacatccgtgagtgtttgtgacagacctcgtcatgaaggtcacaaggtttgctacaggaaagaattcccagcagggtggtggcccattgctcacagtgcgcccctacccttccttccaggttcacaatgtccaggccaacatcctctggttaacttgtatactccaatatgaagggatgcttagtatgtctgaagagtctcttgggtttgggaaagaggccctagtctgtcctaggccctcttcggtctgagctagcagagagcaatcgttttaatatctgtgctttacagctgcctggttctgcctgtggctgagcagggactgagtagttgcgacacgctttagacattccagtttggtctccctcctactcaggcctttgtaatatccccatgttctctgtggggtgtgtgaggctcctgcttagtgaacagaactggacaaggagggttttacaagcctgcttccgagaagtggtccccaagaccatactcaggtttggtaggttcaagggattcactggacacagcaagtggctgtacttgggactaccttattacaggacacatatcaaaaccatcaaggggaaagtgaatggagcaaaggtcagagaaaccaggaaccagatgcactggagtgcccagggaagtcctggcggaagtgtttaattcccacacaccctatgggaaacagttgtgaccatccggagaacgtgttaccaactagggaatccccttagaggctctcagcactcagggattttgttggggaatttttacattgatgtcctctgcctacctgtgccaggttcaacattcaaactcctcaacgggaggcagatattgagcaaaacccacatttttgtttaagcatttagagatagtgagccactctaattagttcagttctgggcttagggagccctcctacccatccaaactgtcaagtaagatctgagagcaactctagttcttcctcctcctctctttcttggagatggggtctttctatgtagcccaggctgtctcagaacttactttgtaagccaagctaacttcacacttgtgatctcccaggctaggcttcctgagtgttgagatcgcccatgttcttgactgcactcaggtttttgagggccaaccttgtaagtggcactgtcaaaaggacagcaggctgatctgtgatgttggcttttgtgtgtacagataggaatgagactagagactgaaggtgttggtggagcccttgaacttgaaaaggggaactatacagggtctgtgtttcgtggaggacagaaacaggcttgtccttggacctttatgatgacagctatggtaacctggatgctctctacagagactaacagtggtgatgctctctggaatggagatgaaagaactgcccattcattcttttttgttttgaaatagtaactcattctgcagcccaagctggccttgacagcatggcagttctgcttcagcttcacacatgctgagattgtgtgagccatcatgcccagcaattcattcgttccttcacttccttccctatctatctatctatctatctatctatctatctatctatctatctatctatcatctgtctatcttggtttttttgagacaagagtttctctgtgcagccttggctgtcttggaactcactctatagaccaggctgatctcgagctcagagatccacctgcctctccctccctaatactgggattacaggcatgccaccatccagcctttttttttttttttttttttttttaagacagatactagcccgggtggtggtttggtgtacgcctttagtcccagcacttgggaggcagaggtaggcggatctctgtgagtttgagactagcctggtctacaagagctagttccaggacagcctccaaagccacagagaaaccctgtctcagaaaaacaaaaacaaaacaaaacaacaacaacaacaacaaaaactagacagacactcactgtgtaattctggctggcttcaaactcacagatctgtcttataagtactgagattaaaggcctgtgccatcatctttaaattaagaaaaaaacattttatggctgtttggcctggatgtgtacctgtgcactccctgtgtgcctgatgcctgatgcctgaggagtccaggagaatgtgtcaggatctcctggaactggagttattaacacatggttgttagccgccatgacagtgctggaaatggagctcgggtcctctggaagagcagccagtgctcttaaccactgagccatctctccggtcgttattcattcattcttaatgtgcttattgtcgttattgctgctcatatgcttgctaggcacagagcctgggtaatgggtatgtagtgaacacaacagtctctgacctcatgagacccatgttctagagggaaatgagtaagtacagtgccaattaaatcaccatgagagacctattttaaggtccccaggcttctgtcaggaggactggaaggctttaatcagactaaccagggaaggaatcacgtctccagtattacctgtgaggcctctttgaagtcattcattcacatggtgctgttctccctttaaagacatgggacatttatagccgcttctggaggctattttgacaagtaaacaggagagtgtaactagaacatttatcttggtgactggcacaatggaaatgttcactaaatgatggtttagtgacagctagccaaggggaagctgtgtttgtcacagatgctgacatctgctgagcccttgctctgtgtagcccagttgggaggcacctgccccctaacccccagccctggcttcatggcctcacagtatatctgtgttctgaattagaacttataaaaattattattattattattattattattattattattattttgagaaagggtctttccatcatatagtcctagctatcctgaaacttgctacacagaccaggctggccttgaattccaggagaatctacctacctatgcctcctgagtgctgggattaaaggtgtgcaccaacatcatcaacgttcccatggctgattacttgggaagttggattcgaacccaggcatctcgtctagatttcagggtcttattctctctgttgccttaattagaaagctttaatgctggtctctgtcatatcacatgctggttcctgagcaaggagaggtattggagattcaaggatgcatattgtatcatgccccctatacaggtaggtcacttcaaaatgctggtgagacaaacttgtaagaacgtctaccagtctcacatatcctaggctggtctcgaacttgtaatgtagcagactatgactttcaccttctgaccctacagctcctacctacctcccaagttggggcttgattcatgcatggttggcaagcactgtgcctaccaagctttgtcggctgccagggaaacaaaataaaacatcatttttttcttcagctattgattgtgtgtgtgtgtgtgtgtgtgtgtgtgtgtgtgtgtgtgtgtgtgtgtgtgtgtgtgtgtgcgcgcgcgcgcgcagtacagccctcgtgtggagggtggtcagagaacaacttaagagtcaggtctctcttttctgtgtgtgccctggaggttgaagccgggttgtcaggtggagagggcataagagccccttgctcaggctttaggctctgggtccaggtggctgtgtctcaacactttggtgccttctccactgtgacttggggttgattgccattgtccttcaactcagagagcacaggctctaatacactttcccattggctaagcacttcttgctttaaactagcccctgtggtgttctgactctaagcacttcttgctttaaactagtccctgtggtgttctgactctgggttcaggcctagtcgcccaagagatggccttgaaccccacaactccagatttcacagaggaaacagggtaaacacattctgtctgcctgttgttgtggcttcctcaggctgtaggaagctttctaattcctacaaatgagagtacttgagggttcacgacttaattttggatttaaaatatttagtaccaaggttcggaatctgagatggtcacaagagaggcctcctttcagatgggacacacgacattctccttgtccgatttggctatcagccagccccaggattcccagacaagctggttttcaatgtccccgaatttcacccaaagacttctctgccttgggctttctggatccctaacatggtgttagaggaagttgtggctgcaggtgagggtgagaagcaagaggaccccgaaaaatgaaaattgaggacatttcctcatgtatccaggctgtatagccagggatgacctgaaacttctccctctgttcccacctcccaaatgctgggattataggtgttcgtccaaaaccagtttatgccacgtggggaatggaacctgggttttgtgcatgctaggtaagtactctactaacgaagctacattctcagctgctctctctctctttctctttttcttcccccatcccctctctcttagagagggtctttttgcccaggttgacctagacctcacagggatcttgcctcagccactgagtgttgggattataaacataaaccaagcctggctgaggaaggtttgtttgtttgtttttttgagttgctgtaataataataataaaaaatcacagttcttgctccagactaaagggtagtttatttggagcaggtatgagctaccaaggccggggaatgtaaatttgggttattctgagcaatgtattccactgtaagagcgcttacacagaattttatagtcaccaaacaaaagaaagtcataaaccaatgtgtttaccaaacatgttggggacctcatgtaggtttctgcaaatggaagctagggggtctgctaagtttaacaatacattccaaaaagttcttgtagcagttacagagataataggtcagacctagaggtgggaatagatgtctgttataattctggctcttactttgctgagttctgttttaccagtttccatatgccagtcagccagtccatctgcagggccttcagcacacgtatgtcttctacacagagttttagttcacttgcttaggctgtcttccaagtcctgggctcaatagagggatcctcctgcctcagcctcctgagcagctgggtctatagtaggtgtctctgcaccaagcttagaggaaagtttcttaaatcagaactttgcccgaaaaaagatttgacagtggaaggaaggaggaaaaggcccctgggtgtgcctctgtggtgaatgtgttccgaggctgcctctggagaaggaaggcgagtttgaacagagctggtgagtttacaagacaagtcatagctttttttttttttttttttttttttttaacaaaacaaaacaaaaaactctctgactcttctactttgagttgagactttttccagctccctgaaagcatctcatgggcagagaaacaggctgtgttggggaatttccatttttatgctttaaaagcacagaaatgattaaagtacctactggggaaggatgcccactcttttcctccagaaaaaaataaataaataaaaggaaagaaagaaagagttcaaagaaaggccaggctgatcagggtttttttccccccctttgagaaaggtcataatatatagccctggcctgacctggcactcactggatagactcggcaggcctagattttgtggtctctgcctcctagctgttggggatacaggtgtgcaccattgtggatggctggctgatgtgtggattttttatattcatgttttgctgttgtagccctggctgtcctggaactcattctgtagaccagtctggccttgaactcatagagatccacctgcctctgcttcccaagtgctaggattaaaggtgtgtgccaccaccacctggtttatattcatttttttaatgtacagtgatgtattgcctgcatgtgtgtctgtgtgagggtgttggatcccctggaactggagtttatggacagttgtgagctgccatgtgggtgctacgtattgaacctgggtcctctggaagagcagctagtgctcttagccactgaaccatctctccagcccctattcagatttttaaaatttatttttatttatgtgtatatttgtgtctatgtgagtggaggccacatgtgtacaggtgtccttgcaggccagaagagggcattggatctactggtgttggaggtagatgttagtgctgagaactgaactcatgtccttcagaggaaccgcaagggcttgtaattgctgagccatgtttccagcctctacattcagttttaatcttctggaaagagaacttgagcatcttgatcccaaagcttatttgggatcaggtatattttaaaatttaaatagctactgactaatacctgtaatcccagcacttgtgaagctaaggcaggaggatcatctggagttgtaagctagcctgggctctgtagtgaattctaggtcagcctgggctaagtagcatgtccctatctcaacaaacaaaggagcataaaaccttgaactaaaaagaacctaaaaagaaaccagaacactctggtaattaattcacaaatacaaacaccacacagctaacgaaaggtagccattcacactttcggagtcccaaactctataattcagttatacaggtaggatagccactctgaagcagtggagcttcatggaaggctttttgtttgtttgctttgggttatggtaaaacattggttataggtgtaaaggatttctagaaccccaagcctgtctggcagcacatgcctttaatcccagcgctgggaggcagaggcagatggaccccttgagtttgatgccagcctggtctacagagcccaggacagccagggctacacagagaaatctacctcaaaggaagaagaagaagaaaaaaaaaaaaagaactagaactctaagggagttagctgctgcaaaaatatatatttctcaagaatcattggaatgttaaagaacacgtcacatatgtggaaggggcattttattaagattgtgtttctctgttattttccatattacaaaggacttcacataaagatgatagtaaaagaaataaataaatacattagaaagctgaattatctcatttgtaagaggaaagttaactcattatcctattttctaatgtataattattttcctaaagaaagacccaattttaattttgtgtgaggtcatcatggatgagaatcattttgtaagagctctgtgttaagtgttgggataaaaaaaaaattccagtagcaaatgacacgccatttataaaccaccctgccacttttactgtactaaaacagcttccatgggtaacaagttcagcttgatttttttttttttttttttttttttttttttttttttttttgctgtggttagctcaggcctcttatttgggagggtcacatagtaattgtttatcacaatcattagaaacacaatttgttagaacaaagtctgatgcacaagtgtaattacatctccctgtgtgattaaatgcgggctgcatggaaatttttctcaggggcggcagctgtagccagccaaattcaagttcatcctacaatagaattcttgtgactaactggcactaattgtttgcaaaacaaccagtgggagtaacattcaggaacactggaagtggactatttcagtaccaaaagctttgtcccttgtttttctgcactgtattgtggttagatgatgttaattgcttaatcagataaagtgaaatgagcttttggtctattatagttgttagcagaaatcatatcttgtatctcctcaatcttctcatcttagaaatgggagaatggggtggcgcacgcctttaatcccaacactaggaggcagaggcatgaagatctctgtgagtttgaggctagcctggtctacaaaatgagtcccaggacagccagagctacacagagaaaccttgtcttggaaaagaaaaaaaaaacactatatatttctcagggcaaatattgtgaatatataaaatcataagcactcacattttgactatctttttaagattctttgacagttttatgcatatgtacattgtctcttgaccttatgcacccctaactctcctgattcaacccccttcagacaccccccaacaaagctcctgccacctttacttctttttctctgtaacctttggggtcaaattagtactacctcctgaaatgctgaccgatattattggtttatcttgtgtgggtaatcatagctgtcatgagtcatgagtgcaacagttaagtcatagccagaggatagtgttcttcctcaccctctggctctaacattatttgcatactctattttcagcattcccggagcctaagtggggtaaggggtttgatatagttggtccatttaaggctgaatactcagcagtcacttattctcaactctttgaccaggaatgagtgtttgttttgacttctacccaatgtaaaaagaagcttctctgaccagagtcaggaccagcattagtttacaggtgcaaacatatttgaaccccagagcctataacctcttgattcaggagcccttgatcaggtttatggtagcaggcatggatttcctcctgtggagcagctctcaaatcagtcagaaagcagttggttacttccataactctcatgccattattgcaccagtgggcacacttgcctgacaggtcagttttgtagtgttgacagttcactgctgggtaattctgttgataccctgcttcccccagcagcctgcatatcaccttctagcactatagaatcttgctagaagtcagtgctagcttgatttctctgtgccctgcaacagaatgtgttgtgtcttcagcagtagggtctttccatctagttatggtaggcaaccaacagaaatggtactagcgtttgttgctttgaggaacttttggagcctccctgatcactaattcataaggaggaatcccatatctggcactgaacttttcatttaataatccataaacactcacaattttaaggaaacgtgaggaaatgataaattccagttgccagcttgattgtattaaggaggcacacctttgggtgtgttggtgatggtgtttccagagaggcttaactaaggaggcaaattctccctcaatgtggacagcatcaacccatggactagggtccaggattgaagcaagaatcgggaaagaggaaagacagttgactactgtctttccctctgtctgttttctgtaagccaccacatctccattgccatgatgaactctagtctctgaaccatgagccagaattaacctctcctctttcaggttggttcttgtcaggtatttggtcacactgtcaggacaaagaataagagataaacagtttaatgttatcttactgaatcccaaataatttgaggcattcagggagagagacagagagacagagacagagacacagagagagacgcagagagacaaacacagaaagacagagagagagagagtctgattctaggacctgctgttgagcagagaacatttataaagtggagttcaagagtggggattaggaggcctggaacgcattctggacatccatgctgatcctaattgctatgcagtgactcctctgtagcgacaaatctttacttcaagccgcccgagctcctcctgagttccactcactgccatgttaaggtcctaagtaatacacagagatttatattagtttacaatgctgctggccaatgaataggatttcttattcgttagctcagtcttaattatcaaccttaaccataatctatatattttaaaagacttatcttagaggaagccagcggcaagcatcctgtcttcccggtctcacatggtgactctgacttctacctttcccagaatcctccttctctcctactcctgcctaacttgcttcttcattggtcaacagtactttttttcaacaaccaataagataaatatacacagaaggaaattccccatcactccggggaattactttccctctgtataatttgcatagacaaggacagcatggttcctatatgttatgcagtacattttatgttgtggggagggacccacaacttgaagatattgagggaggagtgcgtgagtcagctcgttcagagtgacaggacacaactaaaattcaagatcatgaaagtcagcttgctagctctaacaaaagtctaatagaatctcctgggatggcagttgctttaaacatagctgaatctagaagcccaaaggataacatttctttcggtgctatttttctcagcatcttgtgaagagctatcatgatgaggcaggatatgaggagtgctaacagtattgtctaccagccagccttggttactgactccagtgcaagaaggcattcctcttttttaaaaactttgttttatgttaattttctttaagagagacttattttcttttatatgtatgactcttcgcttacttgtatgtatgtggaccacacatgtgcttgatgctcatggagattacaagaatgtatcaggtcctctggaattggagttatggatggttgtgagccaccatgtggatactgagacccagttccaggtcctctgcaagagcaagaagttctgttaacctctgagctatttccccagtcttagaattcctcctttaaagtcatattcgtctcagaaagcaactgatgatctaacctgaatcatgtgtaccacactccataagggtacatccatggaccaccaggttgaatggggtccactttaccatgtgagcgagtggagagtgaggaaggtccttaaatcatcataaaagaaacagtatgaaaataccatgatgaaacacattattttatacaattaatatacgtttgtttttttgaaaaggaaaagatgaaaatagtcactcaattaagaaaaaaaaccagcccaccaaccaaaattgtttctaattaattagactttgctgatggctcaagtaactagttcacagcagaggtgcattgctctaaaatggcagcgggaatgccttcctcatttgccaaagtacagctttccaggagggatttgcagaaagagcaaatctgtttctgattttaatacatccaaaggcaagtagattttgaccagttactaccaggtccccgagatcaatcacttcctacaccattagtgcgtgaaggattagtggccccaaagatttatgtgtggattaatcggggagtgtacatcagatgctgtgtttaaagccaccctcatccctgcagatcatttctgttagtgctgtatgcagagctctttgtgagatctgaaagacctcttttcatccctggcttggcatccccctacaccctctgattggacaggtccagctaaggagacacagagtgctggaaagaaaggagcagtagcatcaaatagagcaagtgttaatcgagttgttctaggcgaatagtgaccaagatttacgggaccgtgtactgagagagacaagatgaggtacaagaaatacatagctattctggaagcagcggtgggcattaccccacttaacaaaagagagcttctacctgagagccggagacatgtaaacctttggcagcatcctgggtaagcagaggaggcccaagcttctttcctaataatggaaacaagttttggctgtttgggggacctgagagagaaaaagggcctctctttcatggagatccagtgtgaaattcatcgttaagaatgttttttctttcttccttggtgcatatagcgctctcaaacagattttaaactaccaaaaagcaggactctgagcatctgagaagatgaagtaatggcatgttaagaacacacttttactatttagattttcagtgtgtgtgtgtgtgtgtgtgtgtgtgtgtgtgtgtgtgtgtgtgtgtgtttctgtgtgttggtggcatccatgccatagcatatgcatagagatcagaagacaaccctcaagagtatgttctccccttccacttttacatgggttcaggggatttgaactcaggttgccgggccatctccccagtcctgttttgcttatggataaagacaatttcatatatacccttctttctgtctgttttgtacagtgcaaatgttcttcattgtggttcatgtcagcagttgtgggctgtagctctctctgtattacagcacttgaccagcaggatgccgagggccacgcctagcactggtgtgtgtgtgtgtgtgactatattagcactggtgtgtgtgtgtgtgtgtgtgtgtgtgtgtgtgtgtgtgtgtgtgtgtgactatattccagagatatttggcctcaaacagttttcccatcaccattctttgtcaagcccactgatttgccatgctggagaaagtttagtttttggttttgtttttttttccccaggttcgtgggtctcagtgcaaacatttctaaggtcctccttttgtttctttgcacaatgaaaagcagttgtttaaggagcctgcctgcaggataaacagtattttcatggcctgaattttatttttaagctgcatgagttacacagcagtagtcaccagccagtgtgaggcatctttaatacgtggaatttctttttaaaaattataaatactggcttcaggatatattcattatggaagatgtagaaaatatagaaaaatgagtggattatttatagttccatgtccctgagagaatccctagagtcaggaaagcctgtgcttttcagtgtaggaggaggaagaaaattttgctctctactcccaggggacattttgtaatgtcttgggggcatttttttttttttttaaattagaattcaaggttggtgctggcattcattggaaaagaccatatcccgccatgcacaggacagctcttctaaattcagtgaccgagctgcaaatgccaatctcactgttgtgtagacatttggttgagatagatttttttttcctgtctgtaaaaggagttgtttttttgtttttttaatgagacagagttttttgtttggtgagtcttaggtctgtgatagaatttggagacattactatttattattatatcattactgtttttctcctgaaagtaacgaatggagaggtcacactgtaatgattgaactgacttttgttgttattgttgtttgcttttttgtttttgagacagggttcttccatgcatactggctaagaactaattatgtagttgaggctagcctcaactcataggtatctgtctcccttggcctattgagttctggaataaggcatggactatcacatctggcaaccttttcaaaaaagatttattttgttgttttctttttaatcaattatagctttactggagtgctatcaaattcatctctctctctctctctctctctctctctctctctctctctctctctctctctctaagacagttttcctgcatagttctggctgtcctggaactcactctgtagacaaagatgtccttgaactcacaggtttgcctgtgttatgtttatgtgtatggtgttttgctgtgtgtatatctgcgtatcacatggcatgcctggtgctcaccgaggctggaagaggatgttgttagattcccttgaggtggagttacagagggctgtgagcagcatggggggggggggctgggagtcaaactggatcctctggaagagcagccagtgctcttaaccactgagccatctctccaaattaaaatataactgtatcactactcctttcaccttgaactgcatttccaacacactcacagatgatacatgctgaggggccagatgatgcttccggtttggcacatggaccacacaggtagcagcatccggagacacactttctgttgtgcttgctgtctatcttgaatcctggaacatttggattatcttgatggctttttatcccaattcctcctcttccagaagctgttcaagatctcagtggcaggaaggtagattgttggctgtacttctgtgagagaaaatttcccttgagcattctgcaagaactgggcatgctgttgttgtgcctataacctcagcaccgggggagtagaagcaggagaatcatttattataaaagctacagagtaaatctgaggccaacctgaactacatgaaccaaaaaaaaaaaaaaaacaaaaaaacaaaaaacaaaaaacaaaacaaaaaaaccctatgtaataggaagttataaacacacaaaaaactacattaaaaagcaagctatttcaataaaagaaactgtttagatctgatacctgcagaaaaatcccacatttaggccaaaggcgtaaaaagcacatcttgatttgtttgccgtttatttatctttggaagtaataatagaaactacgaatgggctgggctcgatctgctgcttgctttgtaggaagtccagatgaccttgggttagcctcagcctacatttcctgctgatccttggagaggggaaatgggcctcttgcctgaacaaataaagtcgataccgtcccttatttcttctggtgtggcggtgtgggaaggtgagggtttaacgcagacagtcggtttttttttttttttttttttgtgccacaaacacaagaagtgggtcccagaagtggcgagagggcacattcttcctcccactgcaggattccctgggactgcctcagcgcagcccgcacagcccaggtttgagctcgcccccttgtggtagtggtcagcaatgtggagggttaaatgttcttgaacagagcaataaaaagaaaacctttctcttgtgaagatagtggtcaggtcagtaacacaaagatataagccagtttccctgaaaccatgcagaggaaatccttttgtggtttaaagtgctttctctttgttcgctttaatatactaaattttatgtacattttaccatattgaaaatttctttccagacctgagagacacatctgcacttgatggggagaaatagggttcagtttgagaccaggctccgctacagattgagaccctgtgttaaatcgggaaagattttctctgtttatcagttgttttctcacctgctaagttttttcccctatacacagaaagtaaattctctgaaattttcctcaggtaggctgggcctagcccaatgcctatcagttgataagtagatgaatggatggaggtatgtccatacagtggaatgttatttcattcatggctgttagaagcaatggagtattgagggctggagacccggcaaatggttatgagttcatactgtgccaggcagcggtggtgcatgcttttaatcccagcagtcaggaggcagaggcaggtggatctctgagttcaaagccagcctggtctacagacagaggtccaggaaagggttacacagagaaaaaccaaaccctgtctcaaaaagcaaaaagccagatagagctgggcggtggtggcgtatgcctttagtcccagcactcggaaggcagaggcaggtggatctctgtgagttgagaccagcctggtcttacaagagctagttccaggacagcctccaaagccacagagaaaccctgtctccagaaacaaaaaaactgaacacacaaaaaaaacccaaaacagaacaaaaaaccaaaaaatagatagatagatagatagatagatagatagatagatagatagatgataggaaggtagatgatagatagatgacacatgataggatagagataacgatagacgataggtagatgataaagggcgcatactgctcttgcagaggattggcacctagttcccagcacccaggaagggacccttgcaacctcctgtaactctagttccaggggatccaatatccttttctggcctccaagggctctttcatgcacaggcacacacacatgcatgtaaataattgaaaaaactccaaactctggaagtggagttacggtggactgtaaactgctgtgtgggtattggaaaccaaacctgggtcctctgcaagagcactttaaacaacagagacaaatatatatatatatatatttctgatatatgctaaggaggaacctcaaatatagaatgttaaataaaaaagaagctgccatatagctgccactattgtaatggacatttgcctgaaatacacaaaataggtaatcccaggagactggagagacagctcagcaattaaaaacacttgttgctcttgcagaggacctggatttaattcccagcacttgcatggtggctcacaactgcccataattctagttccaggggctccaacacactcttctgatccctaaagatactggatacacatggtacccagacatacatgcaaacaagaagctcatacacacaaaataaaaaaaaattaaagaaatgacttacaaaaaaataggtaaatctctagaaacaaatgaggttaggttggtaattgcctagagttagagagcagggagagaaatgtgggtctggggagtgattgtcagtggatgttgggtttctttgggggggataataggtgttgtgaagtgtgttacttatacagcctgctgtgtaagtctgtgcatatttaaaagccatactatggggtgagctatgatatttcgaatgtcactgtttcccccagttctcatcaggctgagggtgagcacttagtaaccatactatctcctccagggtgcggagcgctgccttactgtcctctccctgtgagtgggactggcacccaggctgcagcaccaggctcaagcatccatcggatcacagaccggcgtccacctatagcctgttctcccaggtacttgcttacttgtgtcttattaacctagtcaatggctcaccccaaaaatttgacgtcatttcacatcgtcgataaagataaggtcactattttcaaggttgccagtttgtttatgtatgctttctagagaaatttgatggtaatattttatttactgagtgaagaactgaagtatcgtatttgggctgtagacatagctcaggccttaggctcaatctccattcttgcttaaaaagccaaagaggaggagagatggcttagccatgaggagtacttgttgcattttgccaaggttgggcactgtgttttcttggctgaagcatatatgtgtagatctcttgtggtccaaaataaacccatagctggtgggagtagcacttggtgtgcctggtgtctgaagttggagagcattttgataggtcacacatgtagttcgtcatcattgatatggcaaaattatgtaatagtgggaggtacttgttagtctactaaaaaaagagcacattggcgtctacagatggattttgtactcagttttagtgaggagctcagagcgagcattactgttacggactcacttttaaggatgaattagacaagatttacaaggtattaggctttatttcgacagatgcttgggtgtattaatccttagtttgggtttagcctctgatgtagcccgtctgtggctggcctggatggggttggacttagggtttagcctctgatgtagcccgtctgtggctggccggatggacttggacttttcttcatgtacttggttcataattctatctgctttagctgtcatctcctgcttgtttggggaactatagttgagtagtgtggcaactgcatattcctgaattacaggaggctgttcagggcccaggctgtgactttcttattgtatggctttagatacaggtctaacgcctgtgagcctcagattcaaggcaaagtcagccaggaccaggcacattgctaggcttttcttggagtctggttgcttgaaattgttttagtcaaatttttggttgtatgacataaacaactaaagaagagaaagaaactgattttggcttacatattcagagtttttagtccctggttatcgtgctccgtgtttctgggtctgtggtgaagcagtgcatcatggcacagaggccactcacttcacagcagctgggaagcaaaagagataggaaggacacaagacatgattcggtcacaaggacatgtcccatcaccaacttcctgcagccaggccctacctcctgaagcttctagtagctctcaaatctagagacctggtctttaatgcctgaaactggtagacattttatatttagacccaatgggcacacttgaatgggagtgggtctcatccactgaatccatggggcttgtttgttaggatgttctgtacagagtcctgaaaggtctcaaattcgaggaaatttgcttatccaggctgcagaagtgctttatttctgaaatcagagttctagatgggacctgctaatttagtcaaatcaattggaaggacggggtggaatatggcaaagagtgtctcagtcctctgagatattgaaactacagaacttgagctgtgtaactttaaaaacatcaacgtgtgtgtgtgtgtgtgtgtgtgtgtgtgtgtgtgtgtgtgtgtgtgtgtgtacagagcccagggtcttgttaggtaagtactccaacccacagagccaatatcaagtcaccagtgtatttagcatccaatgaaagaccccttcctcatacttgccatcttctcactgttcattgagagcttttgttttgttttgttttttgaaacagcggtctcattatatcatctcaaactcactgagatctgcttgcttctgtctcctgagtactgggactgaaggagtatgtcactaccttttatgctttttgagacagggcctcatcgtgtactcttggctgatctggaactctgttgtagaacaggctggccttgaactgctagtggtctccctgtttctgcctcctgagtgctgagactgactggtgtgtgctgccataatcagcttggagtctctttttataagaaagttagttttgagggcagagtccccataacctaatcccccctgaaatgctacctcctggcaccatcactaagtgtgtgtgtgtgtgtgtgtgtgtgtgtgtgtgtgtgtgtgtgtacaaacaatcatactgtggttgaggggtctgagctagcattgtgagctgtagaatgttctttcaggttctagccggttcctcctgggaagtccttttttgttctgtttttttttttttttgttctgttttttgagacagagtttctctgtatagctttggagcctatcctggcactcgctctggagaccaggctggcctcgaactcacagagatccgcctgcctcccgagtgctgggactaaaggcgtgcgccaccaacgcctggcgcttgttctgattttttaactatgattggcaaggcttccccacagcagccaggctcccagagacagttcctgctttttgatttgttaatggcaaaccagacagggaaaagaaaggatatgagggagatagacagccaggataatagttagactcgttcctggtaaaaatggcaagatacaggttttggaatttggtgcttcaaatataaatgtcaaggaacatggtgatgtcttggacatcaccctttggctagtttgttaaaacacaaatcagccaggtgtggtgactcacacctttaatcccagcactgagttccaggccagcctggtctacagagttctaggacatccagggctgttacacagagaaacgcttgtctcaagaaaaccaaaacatgttgggcgttggtggcacatgcctttagaggcagacagatctctgtgagttcaaagccagcctggtccagaagcaagttccagaacaggctccaaagctacacaaagaaaccctgtcttgaaaaacaaacaaacaaacaaatcacagatcaaggactctcccttgagtagctgggacccacatttgggtttgccttattttcttacctctcttagagatactcttggatatgctatttgactttgccgagtgcctttctcaactcttgtgttgaagcctttgcaagacatctttcctgagtcccaaactgctttgcaaacaactaggtcatggcttgggaggcaggaaaggtcacatgcactctggaacttgaataaaattttcattacttaagtcagtgcgatgacccatgctgcaaactcatcatacaggagggggattgctgtgaatctaaggccagccaggggtgcataatgagacctgtctgaaaaaaatgttttatttgtatgttttgacctgtacatcctcgttaggaaagactttgatttgccttcttccatgcctttcttagggctctcaccttgctgacgccaggagtgtaggagtagttggtgcagtcagcctctgagaacatgagaacactgccaagcaagctctcccagacatcctggggcagaggcacccaaatcaggcatcccaatcaccatgtattccactcgaatacacactgggagaagcagggagagagatgggacttgtgataaaattaggatgcaaatgggacacacttccttttacaaaagagtcggctttcccagctgccatgtggtcacaaaaagtagatgacagggacaagagggcccagcagagggcaggtgtctgaggccagctttgtttaccctgctgccatgaggacacagggcagccttgtcatagctgtaatttaccaagaatcagtgcttgcctgcagttcagagaagtctacatggggccaggatatgatgtgtgccctcactggtgaccactgtaggggtggcagctgtcaatctggaagtaaattaaatataatttaaggaattataatactaatgtttatgactatactaacaacttaagtagaaaattatgagatattataattatataaaaatacagtaatgggactggagagatgactcagaggttaagagcaccggctggtcttccagaggtcctgagttcaattcccagcaaccacatggtgtctcacaaccatcagttatgagatctggtgctctcttctggtgtgtagatatacatggaagcagaatgttgtatacataataaataaataaaatcttaaaaaaaaatacagtaatgggctagagagatggcccagcagttaagagcactggctgctcttccacaggactcagattttattcccagcacccacatggtagctcactgccatctgtaaccccagttccagggtttatgatgctttcttctggcctccagtggcagcaggcaaacacactgtacacacacacacacacacacacacacacacacacacatgctgataaagcacccataaacataaaattttaaaaatgggctggagagatggctcagaggttaagagcactggctgctcttccagaggacctgagttcaattccagcaaccacatgatggctcacaaccatctacaattcaatctggtgccctcttctggcatgtaggtagaacagtgtatatgtaataaataaatctttaaaaaaaagaaaaaagaaaaaagaatgatgtgtaagccaggtggtggcggcgcatgtctttagtcccagccctcgggaggcagaggcaggtggatctctgtgagttcgaggccagcctggtctccagagcaagtgccaggataggctcccaagctacacagagaaaccctgtctcgaaaaaccaaccaaccaaacaaacaaaaacaaaacaacaacaacaaaaacaaagaatgatgtgttggggtgtcttcttactgatgatttatgctttatgaaaagatagtcaagcaacattcttgtgggttttttttgtttgtttgtttttttccttcttcgagacaagagtttctttgtgtagccttccttagctgccctggaactcactttgtagacccctctgggcttgaactcacagagttcctcttgtctctggcttctgagtgctgggataaaaggcatgtgccaccagcacccagtaatatttttggtttttaatataattttttttttatttttggggtggtggtggtaattgaactcaggacctcccaaatgctaaaaacacatgtgccaccactacgctaaacttctattccaataattcttttgtgtgtgtggggggcagttgtttttgaggcagggtctgactgtgtagtcttgactatcttggaattcgctgcatagaccagactggccttgaactgggctgggataacttgtattcaccaccatgcactgtgtttcttacgtgggttttggggattaaactttacacattgtactgtctacccagtatgacagtagaagttcctgaatgttacagaatcacttagtcttctattgctgtgtattatattgccatgtgtatctgtaagttgtatagtctccattctttatagacacttatacacacataaatgcatacacagatatattagaagtttgtttttttaaaattttagcatttatatttgtatttgtggcattgtaaatagtaattgttgtatattttcataaatattagttacttctctcattgctaaagtcccacctgcctctgcctctttagtattagaggtagggcactatgtccagccttctaagattctttttttttttaaatttatttgactttattttatgtgcattagtgtgaaggtatcagatcacttggaactggagttacagacagtagtaagctgccatgcgggtgctgggaattgaactcagcacaacaggtcacaaagagcttctggactcagtatcatgtttctgtattcagagatacctgggtagagaattcgcgtccagtgacctagagcacttggctcagaagtgacatttattactccttttccctattactgggctgtaccactgagctgggttcccagcccaaagcctaagttttatttatttgcttgtttatttttattttgcttcttcttctttttttttttttttttttttgggtttttcaagaaaggatttctccgtggctttggaggctgtcctggaactagcttttgtagatgaggctggtctcgaactcacagagattaaaggcacacaccaccttattttgtttttttttaaactggatcttttaagaaatgtttcactgacactcttggaacttggacacagtctctttatgtagcccaggctgacttcaaacaccttaccttcctgcctcagtctccaaagtgctggcattgtaggcttgcatccccacccccatttcattttactgcctttggtaatctgttgtaggatttgagtaactaaacattgactatgtacataaaagtagtaattaactgatatctaagtgtatgtgtactcaagtaaacacacttgttttagttacttttctactgcttcgaagagacactatgaccaaggtaacttataaaaagaaaacagcactcaggaggcagaggcaggcggatctctgggagttcaaggccagcctggtctccagagcaagtgccaggataggaaagctacacagagaaacaatgtctcaaaaaaccaaaaaaaaaaaaaaaaaaaaaaatcctccccaacctcagctttcaaaataggatcgatcatgtgtttatcacattgttcccactcctgtacgtgttttagaaaagaaattatttgcaaactgttgtatttggtctacagaagacaaggtcttggtactatcctccagtcctgtggtgactggaaagagaatggccccataggatcatgtatttgaatgcttggtccctagttggtggatctgttttgggaggattaggaggtgtggccttgttggagaggcatgtcactatggcatgagctggggagtatctttttaagagcaggactttgaggctatcttgggcaaagaagccagactgtctcaaaatggagatcttcctgtcttatgtcagggaatactaacaatgtctctttagcagaattccccaaaccttggtgatgatagaagcataagcttaaaaataggactcttctcagacccacttgttgcacaaattctagttgctattaataataaaaacccagcaacagatgttggggttaaagctgaatatcagacaagaaacgtggccagcactaccaatgctcagaccgaaagggtgatcctgtcctcagactgcatatccagactgtactgctcctcagactgcctttgtctccaccaaacctcagactgcttcaactaactgctgctcagaccgccctgagttcctgtctcctcccaccttatattcctctgtctacacagccaaatccctttctgtttccacctccttagagctgggattgaaggcatgtgactacaagtgctgggatcacctttgtgtgagctccgcctctcttttagacagattcaatttcatgtagctcagtgtggccttgaactaaaagagatccttctgcctctctctcccaagtgctgggattaaaggtgtgtaccactgcctggaccctaaggctaactagtgtggctgctgggattaaaggtgtgtgccactagtgtggctagttttttactctaatcttcaggcaagctttatttgttagatcataaaatatcaccacacccattcactcaatcttggtgggcttaggatcttgtgtgtgtgtgtgtgtgtgtgtgtgtgtgcgcgcgtgcacactccagcactgttttaatcagtgcctcatgccactttgaggtttcaaaagccctgtctgtctgtctgtctctggcccatgtaaattcttaattactgctgcagcaccatgtctgcctgatgccatgctccctgctgtcatggttatggactaaccctctggaactgtaagcaagccccaattaaatattttctttttataagctaccttggtcgtggtgtctcttcatagcaatagaaaagtaaccaagacatagttctgactgttgtggaacttggtatgtagaccggtttggtcttgagctcacagagatccatctgattctgcttctagaactcaggcattaaaggtgtgcttctttacaagcaaagcagaggcactgatacccaatgtctagagttgctgtaagagttatgttaattgggggctggagagatggctcttccagagaacccaggttcaattcccaccacccacatggtggcttacaactgtctgtgactccagttccaggggaccataaccctcacacagacatacttgtaggcaaaacaccagtgcatataaaataaaaataattttaaaaagatttatgttagttgacttaatatagtgtgtcggaagttcttggtacacaccatacatttaatctgttgactggggtttctgctttcttttctgcaggacgaagctagcaggtaacatttgtccctgaagagagacctattaaacactggtaacacaaagtgcagccctgcctgctccttgccagggaggaagtagtccttcatataaagagcatctcccagcagggcctgccaagtaaggccacacttcttggctcctgtgtcagttccttttctattgctgcaaagagccattatgaccaaggcaacccagaagtttttttttttttttttttttttgtggcgtatggttcaagagatttagactatgaccattgtggtgggtaatgtggtatcaggcaggcatggtacaggagcagtagctgagagtttacatccttatccacaggctaactaggagtgatgccagtcttttgaaacctcacagcccaccccagggttacacttcttccaacaaggccacacctcctaatccttccctaacagttctaccgctggagaccaagcatttaaacacataagcctatgggagcccttctcattcaaaccaccatagctaccatcactggagttgggtcaagctttgttccatcaccttattgacaaagctgagtgctattttggtctctgccaatggcctggacaaacctgatgctttgccctggaagtctcctaaaagccagggcccacatagaactattgctgcttctttccaacttaaaatttcctcccaaataacattgcaggcctcccaagaggatttaaaaatatgtatgcatgtatgtatgtatgtatgtgtgagagagaacatatatgtgccacatatgtgtggtcaaaggacaaatttggggagtctgttctttcctgccatgtatgtcctggggatggaattcaggttgtccgtcttggcagcagggcaagccttgcccactgagcagtcttgctggcttcattcccagactaaaccatccagaccaaagctgaatctgaactgcagagccaattctttggtcacttgtgaggtcaactaaactcatcatactcagaaatattacctatccttaacaccaagcagagggtgctgtggctggggatgtttgccctggccaggcagaggaaaaggcggtgggaaggtaccatttgccaagaagttatccctgtgagcccaactactttgtacttacagtaacatctttcatcgcagcaataacattcatgatgctgaattgccagcgataacaatgaagttcaaaagagggagacttggataatcagctcccttgctttctttggccccagccttcctattgtactgctgatactgaactttccctagccagaccacccagggccttttcataccggtcctatgttcctgaaaggcttgtttcttgaactgcatttccttgctgtatctataacttagatttttctctgagcatggcttcctggtatcgactcaagtgggtgcttcctatttcaggcatagaaaggaatctaagcaggaagctcatgcccatctgtaaacatgggacagaggaaggaagatcccaagttgtaaaccagtctgggttacaaagaccttgttccccaaacacaaaccaaaagaagaaaagggaagaaaaaaacaaaacaaacagacaaaaaccctaagcaggaaaagagcgccagtgaagactctagggcaggaatgacagaggccacagccacaaagaaagccagtgtgactgctggcagtgagcttgtgagacttgtcctctggaagagcaaccagtgttcataaccactgagccatcacttgagtcctccagattcagttcttgatgaagaccttcaccctttgctggctggaagagacttcatttctttctttttagtttttcgagacagggtttctctgtgtagctttggagcctatcctggcactcgttctggagaccaggctggccttgaactcacagagatccgcctgcctctgcctcccgagtgctgggattataggcgtgcaccaccaccgcccggctgagacttcatttcttagtatagtattttctaaaggtgtggaaactgtgggatgggggagaagggaaatagcaacgaatccattcatcccattatgaggctcttactcccccccccatgtccatgagtgtgcttgtgtgtatgtgtatttgcatgtgtatgtatatgtatacaggtgtgtgtgtatatatacaggtatgtatgtgtatgtatgcagatgtgtatgtatcatgtgtatgtgtatttgcatgtgtatgtatgcaggtatgtatgtgtctgtattgtgtgtgtgtgtgtgtgtgtgtgtgtgtgtgtgtgtgtgtatttgtatgtgtatgtatgcaggtgtgtgtttgtagggcagaggttgatgtcaggtatcatccttgactattatctactttacttactgagatgtttcatgttgggctcagaacttgttgattcagcttggttagccagcttgcccaggggatcctctctccactgctgtgctggaattacatgtgggccaccaaacatgtctgtcatttgtgtgggtactagggatctgaaatcctgtcttcatgcttgtgtggcaagcactttacctatcaagtcatctccccatccccgaagggtaccacttttaaatctagtttggattggtgaccttttgagtgcttgatgacctcgaaagagtttaaacacaaaaagtaatgatcttattttcctgataaaaagatcatcttggcccctgggagaattgaatgggagggaagacagtgaggctgcgtccagggagacagtgaggctgggtccatggagacagtgaggctgggtccatggagacagggatgctggacagtgaggctgggtccatggagacagcggggctgggtccagagagacagtgaggcttggtccagggagacaatggggctgggtccagggagacagtggggctgggttcagggagacagtgaataggtaggttttgaggagagagactttctacaataaaaacatgtaatctaaaaaaaaaaaaaaaaaaaaaaaaaaagaagaagaagatactttcataatgttttccatttgatttttattagtttccaaagtatctttggaaatttactactgcaaaactttgtatatgggggatccctttctttactcttttgataatatttttggggactcttcatcatgctaaagaagcatttttttttgctgttttgttcaaatttagttgtggtagtggtgatggtgggttgtggttgttgggttgtgtgggtcccatgccccaccctcctctgcataccactgccaccatcgcctccatagacctcatacaagacttctagtgagctataaatgccacccttgcttaggtttttctttttttttcctatcagcatcaaataaagttttatttactagttttaagtaaaatagtttactattattttcattaaaattattcttccttctgggtagtcatccaagtaaccttctgtttgggtatgtgtctagtatatatatttagtttttgaggtagttgttaggtaggtcttagatgatctttaaaagtttcttaggcgagtgagagagttagttcatctggtaaaggatctagccagcaatcctgatgaactggttggaattctaggacccagatggagaacatcacacatgtaaataaaaataaaatcttaaaatttttgagtttttttttttttttggttatgatcatgatatcatctaagctgaaatcctactgatcatattttcttacagctgtgaaatcacaacagactacatcaattaaaatataaccaacaagtattttccagccatataccttctaatattttgctgaaggtagaccattatgaatgatataatggcatgactatgactttgggaattagaccatcacccttcctttgatttttgcctggtatttatcacggactataatttctaagtttacttactttcttgattatctacctctatttttatatttttatttaatttttggtagcatgtaaaataatggatatctctgatacatataattgtatctttctcatatttgcagaaatataaaatactcatgattccttgtgctggggccatgcccatctccgttcatctctgctgttgattgagttaggaccacacaagtctgttgttagggcctgaggatggagctctgtggtccgttgcatgtttagtatgcatgtgcttgtgaggctccagactcttgtctccatcacagggtagatgggaagggagaaataaatcattattctatcagggtggacaggttgggcaggaatgtgtggcactagaagttccaagttcaagtaaacagttctttagtaatgtaggatttggaacgctagatagccagtcaccatcccccacttcccacaagggaaagagacgaacaaaacaagagtagttttaccatctctgagggtgaaagaaccaactgtgaggacaaggatttgagcagaagttgaggtgccccctcccctactcctgaagtagctttgggggagtggggtggagtggtgttgtagaagctgtcctgcaaggcaggagggtggttattaaggactgatgtttggaatgaggaggtgcagggagggccaccaggaaggtaagagaggcacttcttttttgagaactgtcagggatcacatggggcttcttttgacttgtcagttgtcatcttttgtgtgtctgtctttctcttcatcgtactgtgggcaactccctgttatatgctgtctttatctctacctaccctaggggataaggtaggtatttaagaaatgcttgtaggagggctgggtctgtatgattccagtctgccttaggtgtaaaaagtacccgggagacttttctgtgtgagtttacactgctcccaaatgaagaaactatgcaaccatgttgcaaatatatacacacagatacatatatatctaaatatattctgttgcgggggagggatgaggtgggggaagagaatgtcgctatagagatctgaaatcttaaatttttttctttaatggatgggatagctgcttaatcatactaggcaagcatttagtcctgccctacccacttgtgtttttggtgaggctgttctagaactggctgcatagttcaggcagagcttgatttggagacactcctacttcagctactatgccctggtttcctgcctggtgagcaaatagcattctgcaggaaatctgactaaatgtgttgtttgtctaaatgcatttgtttgagttgtcttattttatgtatttgtttgagacagagtcttattgtgtaccatggctggattggaacctactgtgtagaccagtctatcccggaactcagagagatccacctgctctgcctccagagtgtgcagactgagttgtttcaactaatctatttcagaaaccttatacattgtaatttacaaacaaaacaaacattgactataattttaaaagggaaattcaattcacaatactttcattgaaacgttttccctgtacactttctgattcttttatgtatttttatgctttactaattattatcacaggttagataaaacttgtgtttgttttcattgacagttaacattgtcattattctccttgctatgaaagttttctcatgttgtagttaacctgttgttgtctatactggagattgaactctgcctcacatatgccttctaccctaccgtgggactatatccctggtccttttcttacttttcgttttgagatagggtcttaaaaaattgctcaagctagcctagaagtaactctattgtccaggcaggtcatgaccttgaacagcccacctttgcattataggcctgacttgtttatgttttgatatttatatttttgttttgttttgctttttttcattgaggcagatcttcccggggaaggtgaggctggcctgtaactcaagattctcctgcctgtggagattagtgctgggattatagacatagatcactaatgctagacctgctttcccttaagtaggacttaacatagatggtatccatctcccctggttggaaaaaagacccttagctaagtaatggaacagctttggccaatattaccattgggtctttatgaagcaattaagttcagagtcagtttttttttttttttttttttgagatgatgtcatatacccaaagctggccttcaactcgttatagctgaggggacttctaattctcctgtcctccctcacctcccgagtgtaccaccacattgattatgttgtgctgggctcaaactcaggactttgtgcatactggctaagcactctatcaactgagctacatttgcaagcctagtcagctcacgattgacttcctcacagttctgtgttattggatacgttccccttcctagaactccctcttcccatgactttttcactattcttccccagaaagtttcttctgtcttttcacgcttgctctgctctctgtcctgcagagttcataatactctggcattcccataggcaggtccggactgtctttggtccacccttgcctctaactacattttgtctgaataggctcatcccttctcatgacgtcaatttccacaactcattgatgattcccaggcctctctatccaggtgctcattaatccctcctgtagttgacacatcgttcttgacggttgtgtctcactaaactcatttattgtccttcctgaggcccctcccagggtaagctccctctcctcggttctccactgtggtcaaaggaatgtctacacaaggatgccacaaacctgacagtcatgctgggttcacttccctctggtctctcacaactgctcactcatccagcctactgaaccacttcctcagtttcatttgaacctggcttccttctgtctagtgccatctgacttcagggccacagcatatttctcctgctttcccacaatggtggtagatacagactaaatccttaccaccgttccccatatcctaactgccaaacccatcttcccagaagacaacagagatttatataaaatgctaactgaatcccacttttgtaaaggagttcaacacctgctgtcctgggccatgtcacatcatggtatactcagggaaaggctgctagctccatgttctttgtttctacatgttatttttttcacctagaagaccttttccttttattttgtcagggaagctctccctgaaccccatcctcccatatcagtaggaggagttttcatttcccccctgtttgctgactctctgctgtaatggactccctgagtcaggaggaaggctagcctgatctgcatagtgagatcttgccatgaaagaaaaaaaaaaaaaccaaaaaaaaaccaaaaaaaaccccaaaaacaagaggttaaacaaattccaggagtaggtttgaaatattgtatcaccatgaaatacattgcttctcagaagaatggaattaatttagggccagatgtggtggttgtatgctttgtaatctcagcatttcaaaacttcagcaggcgaatctctggattgaggatagcctggtctacatagcaagaatgtgtcacacataccagagtatgtgtgatggcttatactgccatcacaaagcctgtgtaacagctgggaggtgatggcatgcctttaaccctagcactcccgaggcaggcagatttccatgagtttcgaggccagcctggtctacaaagtgagttctttttttttttcttttttttttttttggttttttgagactgggtttctctgtggctttggaggctgtcctggaactagctcttgtagaccaggctggtctcgaactcacagagatccgcctgcctctgcctcccgagtgctgggattaaaggcatgggccaccaacgcccggctacaaatccaagacagccaggattacacagagaaaccctgtctcaaaaaataaaataaatcccccccccccgaaggaaaaagaaagtgtagcaattgaatcaagtctatagactgcttactttcaggtgttctgttagaagtggcatctgtcatcatttgtcatgataggaacactctgtatctggactgtccaacgtagtcactaggtacatgtggctgtcagccctggaaatgtaagtagtatgactgagaaactgaaatgttcattgcctcttattttagctaactgaaagtgaaatgtaaatacaggcaggtggtaagggctgttcaaattggacagccccagtctagagaggaaaaggtaaccatttaacaggtgtaattgctgcgttccggaccctttcttcctttgttgatgctttgttgaggtaataagctcgtgaaaataaggtgtgactgactcacaagtgcagtcattaccactgtaaggcggcaccacctaatttggggaaccatttttaaacaggtgcttagatcaggagcgtaatacaacgcgcaggtcgggaagaccagcccgcgtcccactggagacgagataaagtgggaaatgttactcacagcacttactcagaggcgtggacttcctactccaaaggaggccagcagcataacgctttgagggcagcatctgcaagacttgtttttccacatatactgccaaacttgtcctgattagacaggaagtgaagccacttctcagagagcccgccggcatctggatctcgtcatggggctctcagacctttcttactttttacctatcaaatttatgggcctaggctggagtttgccctccaatttaggggaggaacagcggtgggcaacgctttgtcctctaactccaaatcacgtgtttaatcagtgtatcagcttttgattttaaatacttgatgtgctcttacaataggacagtttgtttaaagcgcacgattcttgcatggtgggggactgaataaatcctgtcggatcatcacccttgtggagagtgatttcaatctctttattggagttgctggcgatatgccaaggaggttacctggccggcattgcctaaaaagttccgctttactatttaattctatgacctttgtacctttggaatctgggtcagcagtggagctgcaaaatttggggagcaacaacttgtctgtgccggctgaccccgcgggccacttccgacgcaaagcttcggggtttccccagtggttctctggaagagaacacaagcgctgcctgtgagaagccccgcgatcctttctctaaaaaaaaggtgtccatcaggacgccgcgcgacctctgggacatcggcggccgcgggccagcctcgccaacgcgcagcacttccccgggcgcgcgctcggccggacctgcctggctcttaagcgcgcggtggagcgaaccatccggacagcgaggcgggggtgccggtgggacgcgcgcaatcggggacctcctactgccccaggtcctctgtcgccggccgggagtccgggcgcatgacgctgcccgccgcggggtctcgggcgcggcgccggcgagccatcccccggcggcgagggtggtagcggccgttggagtttccccggccgggcggccggcgtgggcgcagctaggcgcggggcgggccggctgcgccgcgggaggagggacaaaggggaggctccccgtggtggcgtacgggccgccactgcagcttgtggttctgagccgcggcgaggaggacgtgcgggaagagcgcgcaagatgccggtgcggggagaccgcgggtttccgccgcggcgggagctgtcgggctggctgcgcgtaagtttcctcccggacctggcggcgagcggctgcgtgggagcgggtgggctccgcgtggctcccctctgtgcccgggtttggtctctctgggctgtagggtcctcctcgggggacccgggcgcaagaaaggcgaggattgctagcacggcgctgatggcttgtggcctctctgaatcacttggctttgagatgaaatcgccagtaggggaaagtgtggagcccagtgccctggtgtcggtccccaagactttctgtgcctgtggtcgccgactggacgcctgagtgtgccctctttctaacttaatgcagaggttctagccacggactgagagaaaccgaggactcttgggtacccaaatcctcactttcctttttagtcagctgcctctgcagtacaacttcttttgcagtagggaatggagatgggttttctgaagaaaccccagaaagaaatgatgaatggtttgtattgtgggagtatcttacctgtcatcagtaccttttattttatgtctccatttgtcaggtttccgcttttacacggtagtttattttaaggtataaataatcagggatttcgacctcaggctttttcacattcttgaaatgtgaagaacttgggagggaacctgccaggactcagtaatggaatacagccttcccttctgttttagctttagttctcaggctgagttgcttttctggcgactgtctgacctgagtaataatggttgtggctttcctgaggttcccagggaagagtcatcccctcccagaaactgccctgcactgtacactccctgacttcactgctgaatcctaggagagagggagagacctcctcacagcttactaggtggtctgttggctgtgcccacaaccccttacaaaaaacaggtctatctatcctcccaggagagttgccctgccaggctcacctgggaagaaagtagttttagctgagaaattagtaagtagtaattgcatttgaggacaagtgccccttaatttccattttcttgaataatattgctttgatgtggggaatgcacatctccagttttgttagggaaacgagcaaggagtaaagagaccaatagtgctatttagaagtatggacagggtgctgttatagcagatgagaggaagggagggagcgttagccaaggtaactggctttgagttttgtcccctgccctctcatagcttcttggaaagattgataaaagggagagttttttccttttcacattctcctacaactgtgtgtgtgtgtgtgtgtgtgtgtgtgtgtgtgtgtgtgagtgtgagtgattgtctctcctgtgggtgtgtggtgctggagactgaattcaggacctcaagcatattttggagtggtatctccagtggcagctttttagtaccaccaagctaacatttgatgagcgcctagttggtgccagtcacttggaagagctacagaattgactgagactggatttctgcttgtaggagtttagtgacaccagcatggtagactgctttagatggatctggctttacaggattcctggtaccgaaggagggaatgtttaatatagatgcacactctgtaacaaagagtgagattgtcctctctgcctgcattcctttcgggaattctttcaggaaggaaagaacacatgaacagatacttcctgatgtcagccactgtagggaattgctgggaatgcatccacctcacagtacactggcatagattgggtagctaggtatatagtggtcattggtcccaaaatttaagtgtggggttttcaatgaaggatttgggttgatacaggagttgaagtctagaagtgtaggtaggaggtgccagatagttgccaatgaaaaatctgagacatagaaagtgttgtacaaatctctttggaggggagaccttgaatgtcagtaacagaactttgggagtgggaatcacagaaactcctaatgtactagtagtggtccgattctcctaagaggcctgagagctgttctcctagcaaacactcctctctactccctatatagtaaaaggtactatttatgaagcttgcttaggaacacgaccagattcatctcattgccctcgggggaattcatttgcagtgacttatgcctacatttacttaacccttgatctagttccttgcacattgacagcagatcatggctaaccagatatctaggtgcggagtgagcactctgacaaaatacatataagtgcttgggagatggcaagatttccaccattttcttttcacaaggttctctctccttaaaaggttgtctttgaaggagacagatccttgaagtagggggtgggggtcactttaggtcattgtagctttgtgtacaatataagttgtttaagaagactttccgagggctgaaaataaaataaggggcccagaggttaagagcattgactgctcttccagaggtcctgagttcaattcccagcaaccacatggtggctcacagccttttatattgagatctggtgccctcttctggtgtgcagatatacatggagaatactgtattcttaataaataaatacaatccttggggggaaaaaaggcattccactttggttgggcagtggcttgaagtgtgggtgcatagggcagctatggaattgggaaggactaataaccactcaacctttcaacatctcccaagagtattagccattagggaattccttgcctaaaccctaaaacaaatcccattaagcagcctggccatattaaagagttctctcaatggagagctgcctcccaataaaattccccattgattataccctaagcaacaaccaaggatgcaaagacgacttctggtcacagtaaccttgggccagaagttttgatgttgagaggtagaggtgctttttgatagggtgctgtcttgtgcctggtttccccagtcttgggtggagggaagcagaattagcatgttagctgggccaggacttagaggcccagcttcaacaccattttggtgacttaagcatatcaaagttcacacaacttgattaagaaatagaaaaccatttagtgtccatttaacccacacagggaattttgtgatgcctgctcctgccttgttagtgagagcccacacacctgtggcctttgtgtaatgcagtggaaatcgatgaagtacagattcctcgatggccgtgattgtgacagccagtgctgacttgggatggtaccagggaaagcagtcagaaagcttgcagagtttggggtaatgcagaactgtgggttggaattctgaggtcttttccccccacttgatttaaacaggtgcttcttagaatttaaatctaacttccggaggtcagcatgtacttgggcagtggtgttgctgatctgaggagggaatttaggctagggccttgcatgagctgggcaagtactccaatactgagctgtatcctcaggcctctatcctggttttgtttttgttttatgactggtgcctgttatcatggccactatctccaagcttctccaaagtcatttacctgtgagctcagaaaaaaacactaaagactttgacactcctaaatatgtagcaatttgagttttttttttttttttctttctagagtatctaccctgttgtggtgcatacaaacttgaaggagaaaaattatttatttagttacttattctagcattctggaggcagaagcaggcagatctctctaagttctaagctagccagggcaatttaataagaccctgtctcataatgtgtcaccaccaccaccaaaaccatcccaataattctcttccacagggattaaattctttattactttgttgaaaaggacatactttgtttttctgtttttctacattaatgtcatttgagggattaaaaaaacaaagccagccaccagtccctcttatttcaagattagatagtgaaaagtttctgcaccccgataagcctctctgttgacacagcaatccaaatcagaccaaatctttgggtatatggatgccagggggtggggtgaagcttccaccataatagatagcttacttaggaggaagcagaaaataatggtcaagtagaactgagtgtattaagatgtgtaaacttaccatgacgagtagtattataatgtaagaactgcgagtgtggtggttccttttgatatctgagacttgggcagaactatataaaacatgtgtgacttggttctggagaactctgagtgtagccccaccacgccttcaggagccaaacacacagaattgtcctgggatgccgggggcgttgaacaccatccactctgtctttatcatgtgtatatcccccgatttctgctcagttcctttctttgtgtttgcccggggtgtgtttatgaaactcttaacatctggcctgattttcgattttcgttcctctgtctgctttctacaagtaggtgtcgcatcaccagatgttggctcgccaaatgttgttcattcttttgtgataaagtggagtgacagtgaggaaatactttggctcttctggggaacatcactttgtttttaagtggcttgaggaatgcagatccatcaccaaacgattgacacgtaaatggttttaacggctcagtgtctttccaaagtgtggtggatggaggagttttgttttttagttaatgagtttgctttgtggtgctggggatggagtgcatttttataccattggtgtatatattgagctgtaaaaggggctctaaaaggatgttagaggaactagagagtttgaggtagaaaacaaccccctgttttggcttagcagttgagatacatatcgatggttagtgaataaaaatgaagaggagacactttgcatcacaaagttctcttgtactgtgcccgtggggctatttgtgaggagtcctaagcccttggctagtgacttgtattagtcatttcttggctagtgacttgtattcagtcatttcagatcagcacaggtatttgttgagtgcacctgccaggtggttaaagtcaggtctttaacatgatgcaggctggcgtcattccatagtaggatatattttgtaacgtgcctatttaaactttagactaatgtttagcctagctagactttcatgggtgtggcttctatttatgtttctcctcctcctgctctgtacaagggaggcagtaaatatagttaatggtgaaaatgcaatcttgacagatctatgaatggatacctcccatcccttttgttgtctcagggagctgggggtggaacccagggcctggaatatgctaaggtacttattaaaattaaaattactgtattatttattcctgcatgtatattgtgcaacacatgcgtacctgctacattcggaggccagaagagggtgtcacattccctgggtcaggatttagaggtggttgtgagcctgcaaagggtgggaaccaaaccctggtcctctgcaagagcaaccagtgctcttaactgttgagacacctatccccaccagggctctctggttttttttggttgtaacagtttttagactatagttgttactgataatgaaggctcagttacatttttgccattatagtaaagatagctttaatagtgttacagatagtttagttcccccagttgaaggtgattagggtgttatgtgacaaaccttttggaggggggtgggtgatatgaaacatacttgtctactcagctcagatagggaacccacgacagactgacttttagtggtacatataacaccaaagttcaatttggtgaagcagtgagctttattggagttacttaaaagaatatgggtgaggggttacttacaggagcagaaatgacaacaggacaactgcattacaaaggaccatcccagcatgggtgacagctcacaaaagctgggaacctggaacacactggagagtttgcaggtgcctcaggtggtctaaatatcttccaggtagatctctctgagtcttctttgcagctgggcagggagaggcctagtgagtctcttcagtttcagggagttcttgaagcttttttgttgttgtttacctctctgcttaaggagctcccttgcaggatgtaatattgttgttttttttttaatttttttattttagaggcactcatatttacatatccatccctccattcccttgccttcccatccttccatgttccccaccaaccccccaacccatctcccacctcctccccagggataataaggccctctacaggggaccttcaaagtccatcatatcatttggggggggggagggcctaggccctccttgttgtatctgggctgcagtagtatccctccatagggaatggactcccaaagtccatttgtgctctaaggataaatactggttctactgttagagatcccatagaggtcttggttggcctcctagctggcacccacattcagagggcttggttctgtccaacgctgtttccccagctttacgaatagggtctccgtgctctcactaggtcaggtcaactgtttctgcgggtttctccagcaccatcttggctcctttgctcatctctcctccctcctcacaactggattccaggagtatggttcaatgcctgtttctgcttcaaacactggatgaaggctctaagaatgctaaccaaggtagacatcaatctcattataggggaagggcatcaatggcatcctctccatcactgcctggattcttagttggggtcatccctgtggatcccctaacatttcccctgtgccagacctctctccaaacctgtactgtctccctctgtcaaggcatctcctttcttgccctcctctactcctcccctgtctcagtcaatccacactgccagaggagctaggaaacaaagaggacaccaagagaagattgcatagtccctcaaagaaagggagggggacaagaacccctgagcaaagtgggagcacgaggagggggtggagaggaaggaggtggggaagaggagaaggggagggggaggagaacaagaggaatgtttttaaactcagatgagatttacagaatacagggagataatgctttctagtagcaattggtcctcttggggcatggagcctttgttctctggaggaaggaaaaataattttgtcagactgccccagcttgctttttaatatccgactgtagttacctgtttccatgagctgaaagcagttcctagcagagtactgaaggaataagttcagttcagctttaggtcagtttctttttgccttacaaggatagcagccgcacctgagaacctgggcgggtggagtttcactgttgaggagtcataaatgtttccctgagaagtcatctgccacgctcaactctttggaggatccagcagagtagaatgaggagattatttgagggagtatctgagcaaaacgaaaggacttcctgatgagctcagtttcgcggacatgcttcctccttagccctcttggagtcagctattctcctgtttgggattggctagtgtgcacctgtcctgtttgctccagccctatcacctgtgatgcataccatcagtcgcttcccagcaaccattagccctgcccttgtgtgagtcatagtggtaggcccagggcatctgtcatactcgctgtgtacttatgaaattgacgtgatttgggaaggcatgcatgactcagactaagggagaatttaagagagtgaattccttatgttctatgtagtgagtggatgatagtttgtgagcaaaaagccttaccaaaaaattgtagtgttgtgcttggacttctccttgtggtagtgttgagatggggctgtgtgtagctcaggtgtcctcaaacttgttactgtgctgcttcagcctcagggagtcctgggatgagaggtctggcggagatgggaggcactgtggtactcagcttcctaactcttggcttaggcatggaagcagagtctgctgcagtgctaatgaactggtccctttatgtaagtcacacacttaagctctacttagttttgatggctgacagttttccatggtccttagctttccgagggctctcacagtgcttgggtgtagagtctagagaacattctaggtaattgggagtgccttgttccaaatgacttgctctttcagctatatttttttctgtgtgagtttattttcccactggatctttccttcttgtcttcctgaaagacattttaagaaatacggtttaaagacaaccttcctggctgccagtagctgcttagctcccagagcacctgaaagatctgttattaagttgcagcttgaataatgtagatcccgcaggctcccttccctcttcaacccagtagtggctgctgactcctcctttttccttttttttttctgaaatttttgttttatatgtatgagtgctcacttttcttgtgtgtctgtgtgctacgcttctgcctggtactctcagagacaagaaaacaatgtcctatccttttgaactggagttagagactccccccccctttcttttagaggttctctatgtgtagttctggttgtcctggagctcactatgtagaccaggctggctttgaactcacagagatcctcctgactccaaatctggagtgctgggattaaaggtatgtaccactctgcccagttgagcttacaaagacagttatgagctgccatgtgcatgctggaaaatgaacccaggttctctataagagcagcaagtgctcttaaccactgagcagtctttccagcccttattatataaaataagtttgatttattttatttttaatatatgtgtgtgggtacacacatgccacatgtatgtggatgccctgaaggccaggagaggtgccagatcccctggagttggagttacaggcaattgtgttccacctgataggggtgctgggaattgaactaaggtcctctggaataccaggaagtaatcttaaccactgagtcttctctccagcttcaagattttaccttaatattgattgtgtgtgtgtgtgtgtgtgggggggggggtacttgcatgtgagtcaggtacccatatggagaccaggggcattagttcccctggagctggagttataggcacttgggagttgccaactgaactcgggtcctctgcaagagcagtgtgttttcctctccagccccaccacagtcttcttacgaggctttggagaatccatcttcattctttatccttcccaggcaaagctgcatacagggagcttcccacacccttgtcttttgccattgacttttccccagagtgaacttttgccgggatgagcacagaaggggctgtagactgcagttgggagccttttctggtctgcttccagccaggccaaagaccagactactaactggggctgcctccttcccaactactgtgaaagggcgtgctctctgacttcagcctcaagccaagcacatcagagtgtttgagcatggcttcaggggaagcactttgcatcctcaggctgctctggttagtgtctgggtgagttttaagaggggagagagatttttggcctcttagacactccctgaaatttcccaggtatggaactgagttttgttactctccacatgttactattaccagggcaaaaacaggcagctggagactcttggagagtcagagcccccccaatcccccccccaagtggtccagagttgcatatagcctttatcaggaattgttttctttcctttctggactgctgggaaaaacaaaaacaaaaaccaaccaaccaaccaaccaaacaaacaaacaaaaaacccaagccaaacaaaacaaaaaccagggctctgctactgtaaggcaagtgctctctctctacctcagagctacaaccccagccctaaatgaagatttaaatctaaggtctgggagaaatactagttggatacactgaccagtgcccagtttgcaaatgactctgggagggaagggttgggaactgggaaggaaaggtactctcagcccccacttcctcactccccacccttgaggcagggtttctttgtgtagccctgtctgtcctggaactccttctgtagaccaggctggcctcaaactcacagagagcccttgcccctgtctcccgagtgctgggattgaaggcttgcgccaccactgcttggcaactctcagttttcttaagaactggagcttagaattcttttttttctgcaatgtttccatacagaaagatttccaaaaagtctgcatagtcattatcgaacattttctgtgtggtcatgtttatggtgttttgtttaagtataattcatatagagatttatgtttaaatttcaaatgaaggatttaatgtttttttttgtttttatttgctattttttgctgctaagattgagggttttttaattaagatgaaatataatgttaagataaatctttctgccaagctgtctgagccctgctgccatatgggtgcccagaataacacacagtatcttatattagtttacaatgctgctggccaattgactaggatttcttatatgctagctcagtcttaattatcaaaatctacatattttataagacttatcttatcaaggacactttctgctggtgtcctcttcctgggatcacatggcgcaacagagcagagagcaggaggaagaggaagagcaagagagcgatttcctgcttgtattctaagtctgcctgctatgtcactttctgcctggatcacaatatttctttcttttcttttttttcttctctttctttctttctttctttctttctttctttctttctttctttctttctttctttctttttgttttttgagacagggtttctctgtgtagctttggagcctatcctgggactcgctgtggagaccaggctggcctcgaactcacagagatccgcctgcctctgcctcctgagtactgagattaaaggcgtgcaccaccaatgcccggctcaacgttttatcttttgatggattttttttctttaattttgctcttataaagaaagatgttttgaatattccatacacagtgggttgggcacataaacatgcttctctcgtgtgaattctaagtagtagaagtcttgtgttgtgaattaggaacaattaagtaccaatctataactctgccgtcacacagactcgactgtgtattattttgtcttgctacttcttttattcttaattaattaattaattaattaattaattttggtttttcgaggcagggtttctctgtggctttggagactgtcctggaactagctcttgtagaccaggctggtctttaactcacagagattcgcctgcctctgcctcccgagtgctgggattaagggcgtgcgccaccaacgcctggcgtcttgctacttctttgatctcagtcagtgtactcttttatcctgtctagtctttgcatctgtaaacccagcatagagtgcatatccggtgagtcggggttcagtcagaaagacatgtccttccggtgatttataggagagagagagagagagagagagagagagagagagagagagagagagagagagagagatatgcagaatgttgggtgtcctctcaaacagtttgaggctgttggggtcaaaacaaagtcccataaccagtgttcagatatgccccacagaccccaggaggtcactaaaccaaaggttctgagaacccatcaccttctcagctttggcgctctgaggctggtgagaggcagggagctgctaaattggcttgctgctgctggtgcagggaaagggaatgctgggggcttctgctatccttcatgctttcagatcatccacatgtgctcctcgtgcctgaggctcctcagccagggttttgaaggtgtctggcctctggtagaacagcttggtgccagaaagaccagagtgccttctagtgttgctatgaggcactcagtcagtggaagtggctgtcattttttatttccagcatgatttcggaggaccattgtttctgtaatgcatgcttccaagcctgtccttttgactttctagtcagtcacctggatacagtccaggtgacctgtatctgctacctccttcatatggtgtcctacctttgggagggcctacattgtgtgactctagttctgaatcctgcctcctaacactatgttgcttgcgtaggctggtctaagattctggttttgggactacagacatgtaccatcacttctggctctgggtgctttttgtaggagtaaccttgagaagttttaactttaagacttgagggtgtgtagctcagcagtggagcacttgcctggcatctagtaggccctgggttcatccccagaaccagaaaagaaaaacagatagttgtgcagtcaagcctataatctctcagcacttgggaagctaaggcaggagaattgagagcttggggttagcctgggctacctagcaatttcaaactgtcaagtgggaccaaagaaataatgattttgcaagttaaagaagtagtagaagatggcttaattctattaacttatttctttgatgaataacttaaaaaatcccagtgagtacattgtctttgaagtccttctaatttgatatacatggtacaaggcagtatataaatctgatttattataatggattccacccgtctctaactccctttggaatttgtcagatgaaatgcaaagagattacatatttatcccagttttgctttgaatcttgttctgatagaatagtctatcaaaaatgtgggcagtagtagcctcagtcatttgagcttgtttataaaatctaagtgtactggattgctttaaaaatccttagtctctttggcagtgtcctctttgactgctggagaaaacttgactcatttctttttccccctacgtcataatgttggtgaatttgtctccttccttcaaattatctcctctaccactttaacctactttacctttactgtctgttactcttttaaggttggcagggaaacagtggtcacgtgattcactaagtaacatttgaggtttctgtccacagtgctgcttcctcagagatacacggagaccagacatctaagttcaggaataaaccagggcctataactttgctccagccctgggcttagcagagcgagctggctatttgcagagcttgtgtggatttgaaagtgccagaactgtattgacagagtcccattttatctacccccactcctttttttttttctccagactttgagtcagccagagctcacaatggatgtccaaacagtttacagtgtctgaaacaatgaacaaagggtctcagtgtgtggagagtggaaaatggaggtggagggaaacttctgggtagtgacctaattcactcccctctgcaccccctccccatgctggagcttaaatatatattgttattttattttattaatttttggtgggcatgagactcatcgaggcttcttgtgtgctagggaaaatgctctactactttgcttgtgtgtgtgctctttctctttctgtgtgtgtaggttgacctagatatctataaatatttaggcttagtgttataacttggagagggacttgtcctgttgctttatatatttttgttcagcacagaatttatttatttatttattttaaatcgagctctggggttgactggtattcactggacaaaagtcaggaacttaagaaaagtagctgagactgtcctccttagttcctacaacttgctctctgtcgggaaccaggcatctgctgtccaaagatacatttctcactgggctttcttgctgaaaaatgtgggcaaacagaactgggttaaaaataaatttagcttgggcactgccaagtttctaagtgtcgtgtttatgattcacttgtctagaagacatacggaggccatggttatgtgccactcttgtagcacagaggacactgtcatccgccatccacatagcacccagaagactctctggcctctgactaggaaggagtaaaatagtatccactcattgtgggttcagaccctcactaaaaacactcaactctgggactggaacagtgggctggagagatggcaccttagttaagaggattggttgtgtgagggactctcccagctccaagtcacctctgtactgccacttgcatcatctgcagtgtgctttgaagaataaatgtcagggctagttcagttgggtcatgtctcagcaatgaggtgtcctaagaatacagcagtagcacatccttcctgacagtctccaggcttgggcttttggctttgtacttaggatagagatttatgggttgacatgttacagagtggaaagctgtcatccccgtctgtctcttggtctccattgttcccacttggctattgcattcacagtgtaaacaactgaagacctttggttggggagaagttgactacaactagcatggtagattacaaaaatgtcctcaaaagtataaacgttacgtgtcctttgaaatgtgtagaagatcagggagggtttttttttttttttttggtggtggatgaaaggttcaggctttaatactgatcagctctatctctttaagagacagactctgccccctgacaacagtcaggacacgcacaggaaaatgtgttacatcatcaccacatcacccgccacacattacagcctgctgaggactctgggcatgcgtggaacctcagtgcgcacgcgcagtcttccctttaaaagtcccaacttccctgctgctcgctctttttactctctctctctctctgcctcttctttgctgtctctctcacctacacgctctttctgcctctctatggtgaccggccatggcggtcagccattaccactgttcctcttctctcttagtctccttactctgcccgggcatataataaactggttaacatgtctcatctctctcttttcctctttttctacaaaaacataaaaggggaggggtggggagtgttgttaatttgagacagggtttctctgtagctttggagcctgtcctggaacttgccttgtagaccaggctggccttgaactcacagagatcctcctgcctctgcctcctgagtattgaaaatatgttttaggtgtatatgtgtgtgattgagtctgtgtattgtgtcacatgtgtgtccaggagtctgtggaagtccacatccaacaagagttggatgccttggaactgaagacgcaggtggttgtgagctgccctgtgggtgttgggaacctgtaagaccaggtcctcctctgcaagagcagccagtacttttaactgatggccatctctcaagctcacttttccagtgccagagctgagtgatttaagtgagggtctgaacctgaagggaccagctccccattttggcagccataacaacctaacatgtgcttgcctgaccttgccttggttgctaggaggtcagatgactgcctcgtggcaggaaccaatcagaagttagctagtggtgctatgctttatggctctgggtgtgcacagcaatgacttgcagagcataccaaccgccctgggagggcctatgggccataacaaccagttgaccaatcaacacaggacaagtcctccaagcctggaggcacaccaatcctgatcctgtgtgtaccccctagcactccccatacgctgccctataagatctctgtcctgtggtttctcggggtcttttcccagccatccgtcatggtggatggatgaatggccagagctaatggccattcataaagagctaatagctaatagctccttaaacatctgaaataaagcctcttggtgtttgcatcaagctttcgcctccacctaatggttggggttgccacagccctgggccgagatcctgggggcctgagcctccaggggtctttcaaacccacatcggatctacctaagaacaccggaggcttgcttttccattaggaggggttgtttggggaggaggaccgatccgcatctttgctttctagggcagatgtagcatggttactgctggggaaatgaagaaatatgaaaggaagaaaaggagaacatagatcctgaggactgcctcacccttctctctgcactccctctgctctccttccccaagttctttccttctctcttttaaattgacaaataaaaatgcatctgtttctggcatacaacgtggcagtgcttggatccaggtcaacacccactcccacctctcctcagttcctaagaagttgcagaggggctcagcgatggtttgagcttgtatctctaaggtgtcaaatctaaaatgctcatgggtgaaggtccgtggccctgtcctggttttcacagaggctgcagtgttcactggagtcaggtttcagctcagtttccaagccttggacagaactctgcgtaagctgtcccatcagatacctgcaggacggggcgaggtgctgttcttgctcagtgctgttgcactgcggttggttgtgtggttttgctggtgaggctggagaggagatcttgggacttagtcatggtaggcccttggtttagagctcactgaattctcccagacaattaggaaggaggggttaagtgtgtttataggatgggaaacagaggctcagaaacagcgaacccttggttgacacttgtaacagggaaggaatgtgagccagggtgcacttgaaacctgcaggtcatctcaattccaccagcttctgcttctcatcctcaggctggaaggaggtagagggagaaactctgcttggcacattgagcctttggcccaggatacctgtgaacgcagcccctcataaattgtagatgcttttaatttgttacaagataccctcctcccatctcagcgtctgggctgggggtgctctgactttgtagttgaggatgacctagaacttctgtgtgctgggatggtaggtccaggccacacaccaggtttaattggtaccgggagtagaacccagggctttgtgcatgcccaacaagtgacctaccaactggacatgtccccagcccacactatgagctctgtttggatttacttttcttatttctggtaactcagttgtacagtattcagatatgcattttgtaagtgacagtgctgtatctcagggtcaaaaaagtgcatattctctattgatttctaggagtgtaagcattatgcctgaacatatataggagtaatttttaccaccaggaaatcatgtgcaaaaatgatacagcagtaccctcctaggaatgaggggcaggttttctctgtgtagcctggccatcctggaacttgatctatagactaggttggccttgaatttagagatccacctgcctctgcctcccaagtgctgggattaaaagtgtgtaccattgccacctggctgatatatcattgttttttttattttttatttttttgagataagtttcactgtgtaacaaggctgtcctggaactagctcttgtagaccaggctggccttgaactcacagagatctgcctgcctctaagtctggattgctgggtttaaaggtgtgtgccaccactgcccggcctcatcagtacttctaacagctgttttcttttagagactttctgtgtccattactctatgagggcctagagactcctagatgaataagacacagcctaagaggaggtagagtacgtgtgtgcctaattaaaaccatacctttattgtagaaatattgttagcccaatgtgctttcttcatgtcttcatggcttctggtagaaataacttttccctcaactcagtttgaacactattattgatgtcaagatagcttgtggctacaacaactgtgggttgagaaatagaaaaattaacttgcatgtgcttggacacttgcccattggggatcccaattctgtaagctttgctggggttggagtacagctcttaaaacatcggataactccatgaggttgtcacactatttaaagtgttggttttcagttctaagctctgtgtgatcagtaatggatataaaattatgactggatttttagctggacttaattgagactagagacaatggctagagtttatgacctctctttaactgtgtcatttaaggctgctggctttgggttgtgaacgtcactttagtgtctttgtctgagggaatagctaacatactcaggcttaggatcaagaggcaaagatttggtgagatgggtcagagggtaaagtgcttgccttgtcggcccaatgacccatctccagggcctttgcaaagatggagtggagggaagaatgaaccctggaaaattgtcttctgaccttacatgtgcacacacacgcatgcacacacgcacacacagtcacacaaataatagtttaaaaagtctttttaagaaggaccattttttaaaaattcttccacagcaccgtgtgtcaccctgtgtagttagtgctcctgatagtagttaataatctacttggaggattatctaaagcaagattttgatcccagctagccttcccttgtggtatgtgtttagaagctgtcaacagtttagattttagtttatgggcaggataacctgaaatttgcattgctacccaaacaaagtgagtttacttaatttcggtggattatctacccactgagactttatctcttgataattaaacaaatatgtaaacaaataaaaccattgaaaacagaattgtcacttgacagctacactcttggacagacagagcttgttgagggtggaagtgagaaagaaggcagctggaggtttggcgtcagagaagacctgtggggtccttttgtgggttagtactgtgtcttggtgagtgataacctgtaggttcatcaactgccctcttagtgagtcatgtgtagatgtctgccaggaactcccaaaccatagtctgctacttgtctgtcttctgtttccttccttccttccttccttccttccttccttccttccttccttccttccttccttcctccctccctccctccctccctccctcttccctcctccctccctccttccctccttttcttccttccccctctgattgtcctggaactcactttgtagaccaggctggcctcaaattcagagctcaaagctaccactgcctggctgaattaatcaagtcaaacaatgttattttatttttatttatttttggttttgtaagacggggtttctctttgtagctctcggttaagaatgagttttgttgtgtgtgtgtgtgtgtgtgtgtgtgtgtgttgggggggtagggtgtctctgtgtagacctggctatactagaactcactctgcagagcaggctggcctcgaactcagagtcacctgcctctgcctcctgaatgctgggattaaaggcatgtaccacacctggctcatctgttttcttttcctgtacacttagtaagaaacattctcttctgttttcttttctctgtttctctctctgtctctgtctctccgtctcttccccctcaaacccctccctttcagagaatctcctgaagtgggcactagatcttgacagatggttgtatgccaccatgtggttgctgggaattgaattcaggacctctggaagagcagccgtcttaactgctgggccatctttccagccccgagatagtgtatctcttatttgctgcacacactaggttattgcacacactgttagctggctcacgagcttctgggagttctcatgtctctgcctcccacctagaagctctgggttataaacacatgctaccacatctggctttgtgtgggttctggggacccagacttaggtcctaaatttcagtggcaagtgctttacccattgagccacttcccttgccctgaatggtcatgtttggaagtcatgtttgtacctggagtagcttgcactctgtgttttggatttctgtggtttcagttacctgaaggctagtgtctgaaagtatgtagtggaaaattcaggaaagaagtaagttttgaataatctttattgcagtgtactgttttattattgtatatttttaaaatggttccatttgagtattagtagttgtagtctcttttactgttccttagtttagaaattatattttatatggactttcactgtgcatggagaggaagtaacattatattaggttttgtgctgtctggggttgtaggtttccacctggagtcttggaatgtgtacaccttaaggatgaggagggtcagctgccccaaggtctttcatgccagaaaaccaggacagatgtggttcaactacaagccatggcatgaggatagaagggaagactcagggctcagctgctggcgtgatgggttttgctaccacttcctgatagccggttacactctcttgtatctcctccacactgtgtgtggatatcatgacaagccctggatcctgcaccatatgctggttctcacagaccattagttggctcaccagggatgcgcttgttcacgttgttctcacaatagccttggctcatccatctcatttccactgtggccagatcctggggctagccgcctttgtgggctttcaagcaagcattgataatagaggccaggaaaccactctccaacagggagtgcttgattacagcctaccccacagcatcgggtctaatcacaccccccaaacccctgcagcaggtcactggaggatcttgtactcacttgcttcctccagttttggaagggtgcacatctgtactccttcagccactggatggctcatttccgctctgccagctggtgcttcagctctgctatgcatgtctgttgctgctgcaccagggaacataggtgcttaatgcaactatggttttgtagctcatctttgggcatctccaggctgccctggctccgccgagactccactgcaaatagggcagatgaggttttcatcaaccaacccccccccccaatggattacatcatacctcatggctcatctctggtccttctaagtgatgggggcaggttcccttttacaaggttccaactccttgatgcctccactcggtgccactcaagagatgctccaaatatcccattttgttggctatctccgactattctcattactcttcttagtgatgagtttcatggccaaaggatgggtatgatgtcccagtcaggagcgcttgccctggatgaagtctgggttctcctggttgagggtcctggctggagctgagaccaggtggccgcagggtagggtgggtgctgggtctcagtcttgccctgtagaggaagagaaggatggggttgaagtttctgaccactcctgattgtgttggatgaacccttgtaattataactctccttatagtggtatacattttatgttgttgtgcatggacagctatcaagcataatgcccgtttcctttttcccttactgtttgtgaatctgaccttggatctcgtgagatcttttggtgtattcattaaaagcccatttctagtttcttctaaattaattttgaactttgtatttggtactgcattactgcgccctctagtggattttacatcagttaccaggcagtggccttttccaggttgctgataaatgggaattctacaaagaggagagttgtctttttagactttaaggtcatgtgctctttctaatttttgttgccagccctgtataggctcaataataaaatgtaactctgaattgaaaaaaatgttggcacctgtctgcaaaatctctcatgcagagactgccagcgtgactcaggtcatgttgatagtatataatcatacaagatgctagacttattttattctacgtgtgtgattgttttgcctgcattatatatgtgtcccatacgtgtgcctggtgctggaagtcaaaagagggcatcagatgccctggaactggtgccaccatgcggcgacaagtgctctaagtcactgaactgtctgggcagcctcatacaagatgcagggacacagaatctaggaacaggctatttcaggctcctggagtttttgtttaaattttgtcgtaaaagctttattgtgtgtttcctgaagccatggtcatcagcaagaccagcagatgtgcaagctccgttatcttcagtggctttgactgtgagggtgtctctggaggaagcttcacttttctacctgcctctctgctgcctcctccctcatctcgccctcaacctgcagtgattcattgattttcctgtagatccaccccccccccaaataattcatttgtggatcaagttatggcttcttcaagtagtaatcttattctttgagaattttacacaatgtattttgatcattcaccctctcccagcttctcccccccctcccccaatttggtttttttaagacaggaatttaccaggaatcctaggctagcctcagtagctcaggctagtcttgaactcacagtagccctcctgcctcagctctagtgctaggattacaaatgtgtgccatcatagtcggttaaaataagacatccaagttcatcacaaatacgcagtcgaaaccacaagcttgaaaaagtaccatagagtgatggtttaaaataaagttaatatttttttctttgtggtccttgaacccaggacattatatatgctagaaaagtgctctgccaatgacctacatcctctgacctcatttataactttcaaagtgtcatttgtaggtaaaacaaacaaaacaacccaaacaccttaatatttactaaaataaaatgttaaattgttttcagaaatagtctttttttcccaccttgtacaaaaagcataagaaacatcacatttggttcacgaagaccataaatttctagagtcttactttctccttgattgattgaattttgagatggggtctcatttatgtagccctggctggcccgcatcttgctttgtagatcaagttggcctcaaaacttttggtaacccaccccccacacgccttagtgatgaaattgcaggtgtgtgccaccaagcctagctaatacttgatgagcacagcttttttatttttttatttattttttgggtagggttggggattgaacctggtgtcttggcatgctgggcaagcagctgtgttgatgaagtaacatcatggtccttagagcttcttctaaatgctgggcaacttttcacaagcggttagaaatgtctgtgctctttaacccatgcgtcacaaatgtgggggtggggtgagaagctgttcactctagtatatgttgcatgtttgtgcagattggctttctgtgtatgagtatttgacttgcatgtaagtatgcacactttgtgtctgcctggtgcctctatgggtccaaagagggtgccggaggccctggaactggagttatagatagttgtgagctgctggcaaatgaaactgagtctcttggaattgcagtaagtgctgagccatctttccagcccttgcagcatatatttgatttgtctgtctgtctgtctgtctgtctatctatctatctatctatctatctatctatctatctatctatccatgtatctatctatttgaggcagggtttccctgtgtaatgaatggccccagctgacctggaactaactctgtagtccaggctggccttgaactcacagagatctgcctgcctctgcctcctgagtgctgggattaaatgcatgcactaccaccaccaggctgttatatatattttaatactaaagcatgagaaaccacttaagccactattaggggtatggttaacactttgtagtaagcatagctatctaaagtttttaagtaactaaaattaaacaacattagacattcaattccttggtcacagtggtcccattaagtcagtggtctccgtgttgaacaatacaactatggaatgttgacaagacagaaaactcttgtgtgcaaagactgattaagcactgagttctccagggttagatgctgttcagggctctaggggagccctcagctcagggcaggctggggttttgcacttctggcattccagctattgattggtactgactgcagtctgagagtgggctctcaaggttcctgggtctcttctctccagtaggaaaggtatgtctgttgcaggcaccagctttgcagccatcaccaggctcactgataaagggcagaagcacatggtgtctcttttctgtgtgagctatcctctgatggtgccacaggtctgggaggatcagtttaccttgtgtgtgtcatacctggccagccctgcaagcagttcttatgggtggcgtttgaacctgtcttttgacaaagcagtttataattttctttatcttagtatctattatggggtggcagtttgtatgtgtgttttctgtttgtaaagtgaagctgtgttttaatgataaatgggctgagtcagattggaaatcacaggttagacagggctgtgtctttgttgccaaattagcaccttccttttgggcttattaatgacttctttgtaattacaaataagggtggtctgtttaaattaagccttgcagcttactgtaggagagctgtgaacatagaggtcttaaatgtaattatctgctggtgtgtgtgtgtgtgtgtgtgtgtgtgtgtgtgtgtgtgtgtgttattaaaatgggatatttgccaatttggattcaaactgtcaccagtaccctattacgggatcttaaccatgaatagtcatgggactgcagggtctgaaagcccgggaatggttaccagtagattttttttggtcacggtagtcatttggtagaagtggtagcttctccagtggaaaatagacaggttgtgtggccccactgacctgggttcagtcccctccaccttctatttacagtactgccaccaagttcctgtgtgtgtgtgtgtgtgtgtgtgtgtgtgtgtgtgtgtgtgtgtgtgtgtgtgtctgtgtgtgtgtgtctgtgtgtctgtgtctgtgtctgtgtctgtgtctggatgccagaggataactaagggtatggttcatgaggagctctctaccgtgtttcttgagacggggtctcacctggagctcactgagtaggctagagtgactgacttgccagtgagccccttcccatctccacctccctggtcctgggattacagaccacgccaccacatgtggctttcttacatgttttctgaggatggcactcggtccagggctcacatgacaaacacttcactgactgagctcaggatcctggcttcagtctactttctgtacagcccatttgataacctgaatctagagcgagcactgtcttgtgagtatctcacagcaggcctagagaggctcctggagtgatgcaaaaacaggcaaaggaaggatgagtgactggctcacggcacgtgacagggcaggggtttgagaccctgctttcagattgtacagtctaggagacatagttgttttgctttgagacagggtctcatgtagttaagactggcctcaaatttgccatgtagcagaggctagccttgaactcctgacctcttgcccccgctttctaagtgctagaattacaggcatgcacaaccataccttgtgacatgttgtttaataaaatccatttttttgagatgtaataattcatttaccatataatcaaaattgtgcagctcatagcttctattacattcacagctatgccaccatcacacacacacacacacacacacacacacacacacacacacacacacacacacacacacacacacacacagtcactctctgggcagctactgtttttagcttcttatgctaagaatcatatggtctatccttttgcatgaggttttatttattgagagttcatctgtgttgtagcatgtgtagttaagtccttccttcctatgtagtagtgtgtaataggagtagagtacttgtgccaggcaatagtggtgcatggctttaatcccagcacttgagaggcagaagcaggcggatctcagtgagttcaaggccagcctggtttgcagagcaagttgttccaggactggctccaaagctatggagaaaccctgtttcaacctcccccctgccaaaaaaaaagtagagtacttgtgtgtctgaccatcagttgtgcacatttgggtagttggcactagatataactctctgagaaacatcatttctgtatactcatgtgtgtgtgtgtgtgtgtgtgtgtgtgtgtgtgtgtgtgtgtgtgtgtggtgtttccgttcttttgggttccaggctagtcttagtactcgtaggaagagaatcaggcggaccattttagcttggttgtaggtgccttgcatagctgtgcagtgttgtatgatagggtcattatggaggccccatcatttgcagtgggcattgagttaactttgtgaaagcacccatctcatccagtcctcacagttctgcaagggccagaatcttgagccccatctgaaagctgtggcaaccacaccactgggtgtgtgttctcggtcacagcttaaagagagtcagggagctgtttgggggccaggtatgtgtgactcctgcagagtacacagcattgtagggagtaggtactaagtttacaggcattttgagatgtcttggctggaagtctggggtggagcggggtgttgtttgcttttgatgttaacttttgggggacagagtctcatgtgacccagctgacctcaaactcaacacatatccctgcctagtcttagacttctgatcctcttgcctaagtctcccaagcacttggatttcaagcctgaaccatcatgggtggcttcagaagtctagttttggaatctgttaataacccctcgccccacatgatagttttacttatttttatgtatgtatctgtgcatgaatgcttgttgaccagaagagggcattggattcgctgtagctgaagttgcaggaggctatgaaccctgcatgatgattctgggaactgagcttggtacctttgaagaaacagaagtactcttaactgccaagcccctaaccttttttaaaaagcatggttatattaaaaattagttattgtgcccccagtgtgtcctcacaccttctgccatattgttctaattctctattacttaaatgtactctaaaatgtttacctgaggtaaatatagtttgggctaaaaaacaaaaagttcagctgggagatggtggtacacacctttaatcccagcttttgggaggcagaggcaggaggagctcctagataaggccaggctggtcaacagagtgagttccaggataaccagagctacacagaggaaaccctgttttgagaaaaccaaaaccaaacagacaaaaaccaaaaaccccaaagcttcataactggtgtgtcttagcaattggtcagaaatgtccattattcatgctgggaacctgtcagaaacccttctgtaacattattgtaggaaacaggtcttgctgtcttgttcaggctggctttgaagactgtctcatgtggccagctgctatcttctgtgtccgctttaagaaaacatggagttggtcctttggtcacaaatgcccttctacaagaagggtgttactgtggacaccaagggaatgggcactgttcagaaaggagcaccccacaaaggttaccatggcaaaagtggaagtctacagtatcacccactgttgacattgttgtaagcaagccaagttaagggcaagattgtggccaagaaaattaatatgcaaattgagcatatgaagcactcagagtttccatagcttccagaaatgagtgtaggaaaatgacaagaggaagaaggaaggaaagagaaggtgcctgggttcggctgcagtagcagctcccgcagcccaggctcagagaagctccccttaagaaccagtgggaacaagggtggaagccatgttcctgtaaactaatgactaagagatacagaagaaaaggagctctagactgtgcacatatttccttattaaacagaactggtttgtttttcccaaccttcaccccccccaaaaaaaaccttattgtaggatgaaaaacagttgaagtcattctttatcttgtgtgaaagggggtgtagcccttggtgatgagtgtttcaaaattgtatcttgtcagcagaggctttgtttttgagtctctctctctctctctctctctctctctctctctctctctctctctctctctctctctctctctctcctctctctctttaaatagcccaggctgacccagaaccctctcagaggtcttgctacctccatctcctgagtcctgggattatggtttgaggtgccatgccctgcatgtgagtagagctttaacagtacttcatcgttaagactgttttctttgggttataggaagggaatccctagtgtccctgctagaggaaggtgggctgtggcagtaggctgctgacgggctttcctcctgggattgtagttgattttctaatgatccagcatgaagatgccagagggacactatatacataaagatccgatcaccatgtttggatggtgtcatggggtttccattccagttgtagacctctcaaggaccgtgatgactcaatttgagctcctcccgatttctcttttattttgaggcaagatctgaatatgtatcccaggctgaccttgaattgttggtccttctgattctgcctccctcccaagtgctgggatcaggaggccaccacacccgatctgccctccttcaccctcttctcccttctctctgtcatcttctctttcccctttcttctctttagacaccctaccactcgtcaaaggttcagtgtgtggagtgctcccattatatcctgtcattagattcagatacatctgtgataaaggtgagccatggctctgagttccaggccagcttggttaacagagctagttctaggatagccaaagttacacaaagaaacgctgtctcaaaaaaataaaaaagtgagccgtggaaagtctttggctttagcgttcctaactgtgaaaggggcacaggtgcagctaacccacagagcgcgcggcattcattgagagtcgctgtaaaagccctcagatgtagtgctctgctcaatgctggtggcttccttctctctcagtctttgtaaccgcctgtggcctattcccctgggaaagtatgtattctcaaggctcccgagcaggagattaatttcgacatgctcatgtcgaagagaacatgtttctaaacagtgtactctccagcattgtgacacatcttacaagttcatgctcttggaccagaatgtgctcttccctccacatagaatgcttctctcctggactgatttgtcccccttcagccaggagcgcctgtaaacttgtgtgagaaggtactttctatgaaggtacatgcctccttccactccagctcccccgttaacacccgagcctgctgtcacagttcactttattatatattatattatttattatatatacattgttctgcttgcacatatgcatgcacaccagaagggggcaccggatctcattgtagatggttgtgagccaccttatggttgctgggaattgaattcaggatctctagaagagctgcaggtgctcttgacctttgagccatccccccagcccccccccccccatgcccagtttactttatgtacttgctcttatgttgtcagtcattctacctgcctcagccaatcactgagttgattcctacctcagagtcttcgaaacctacctgctggttcctttccctggacagctcttcagacttccttatgattaattttttccactttgatatccatagcattcatggtacttggtggccatgcatataatcccagctcctgggaagtacacagaagcaggaacatacttcaaagccagcctgggacacatattcaaatcctgcctcaaaatgaaatatagatgccaggagagtgcaagagggttgtatcgtttcttctgttgaagccttccttccctctgagagaagaacatttggtgcatatcccctagggtttcagcagcgtctgccatctggttggtactgggcgagtatatgttgaatgaatgagctttgtgttttcctctgctattgcgcttacactgggttagaataatttgcttacacttcccactgccccactgaccgggactgccttaggggaatgactcaagagttgtttatctttgcagtctatggctgctgtgtagtaaatgtttcttgactataaatatgaatgttaggaatctatggaaggtgcatctgaaattcctggaggcagccttcctgcaaatgtccttctgatgtcaccagtggaagtgccagcggggacaggctatggttgttctgttgtttccaaggctggtctccacagttctgcactccagggtgggtgggatgatgggacttgcttcatttgtgactactgctggccctctgaagtgtaggtgggaaagggcatagcacatctaatgcccaagaattgtactcgggtttgtggctttaaagcttactttttggatcctggagagatgatggctcagctaaaaagtcactggctgctcttctgtaggacctggcttcagatcctagtacccacacagtggctggcaaaggtctgtaactccagttctagggaatcttataccctcttctggcctccatgggcacggcaaggcacacatttggtgcacagttatgcatgtagacaaaacactctaccacatataaaagtaaacaaacaaacaaacaaataaataaataattaaaaaagaaaggaaaaccaaaacctcaaattaactttttggtattcaaattgtctcctgtcctatagccataatgtgttccagatttagagctatgtcccagtgtcaaataaactaggtggtacattcttcttttgcaaacagctcagcctgttgacaagatactcaatggtgacagcacacttctgaaaacgtgcgttgggttgcaagcccaggcacccttacgttcagaatacaaaactacacaaagaagcaaggacaaagagctctttgtcgtttctttatctaagtttatggtaagttgggaagagacagggaagaaaaaaaaaaaaagaactctgctgagcaagttctctgtccctgtggcagtgccgacctgtgccggctccccttgttgtcaccaagaatgtgtgccatggctctgggtgtcttttgattggttagcactagcaggttggtttagccgttcatttcctgctgttttacatttcctgtatggagtgcatctgtgaacaaattacttctctgttcctttccgtagcccttctcttgtttacagtcattcttggtttcactaagggattccaggagtcccttacacactaaaacatacagaaatctcaattccctttttatgaagtggtgtgatgttcatggaacttcatgtgcttccagctatctttaggttcctaatataatagaagtgctacttaagcagttatattatttagggaataattggcccaaaaggctgtacatgtttagtacagacacatttgtcttgtcttgctttttttttgtgctgagacagtatctcgccatagatagagtacaaactagcctcgccctcactgtctcagcctccccagagccaggaggtaggatgtttttgattgttttttttgtgtcttaaaattttaaaggttatttatatttttaatcatgtgcatatctgtgagtttttgcatgtatgccatgtgtgtgcaggagctcatggaggccctggattccttgaactagaatttccagacaattgtgagccactttatgtgagttctggaaattggactctggtctcttaaccactgagccatcttctaactcctaaagctatttttggatcatactcataggatctgtggatatggaagaccaccaatacttaatagtcacagttaaacaccaaatgattttccgtgactggaagaaatatataccccagtgctgtcctccttgtgtgggagagagggaggaaaagaaagccgttgaagtggtgagtccagactgctttctttgtgcctcacaagtagtgcttttcaaagcgcttggcgtccctgctgtatggatgtgtcactgtgggatgacaacaggatttgctgggaatgtgggccactattgtacccgccttacgtaaccacgtggagtggtggaaatgggcgagcagcctgggaggtaggcagtggccagccctgactctgcagagccatgaaggctgctcaggtattccagaggatgtggatccaggcagttaaaaagttggagaggtggaaaggccatgtgagtccttcagctttcgcctttctttcccgtgcttgctctgccggaggggaggggggcaagtccttcacacagtggcacagtgactcctttatcctcggatttatttgtgtcttggcagctttcagggacaaattgtgagattgcatgcagagtgtggcttgcagtcaatggtagaattttaaatactcgtcttattttgagcagaccaaggtgagattgatagccactcactgcatgtgtgagtcagactgccgattcccatgtgttggcaatctcagagagcttggcttcttggggacagattaatacactgtttctgtgtgtttgagaattttgtgtttgggatcaaacatttaacctttgtatccttcagaagcctatatcctgatggcagggcttcccattacaggagcgatttctgaaattagttttagtactcagggcactgttactcgggtatttgctgtgtggcttggactgtgattgtgtctttaaagcagcttggggtgaatttttgttcttagtggtctctctcactgggaaacagcaatatagggacatggagcttaaaggttggctgtcaggttcattacaggctgtcaagacttagttatctgcctgtggttggttttaaatgtttcctcttgtgtgtgttgggggactgagtgcgtgtgtgtaaaaggggctggtatgtggagtccaagggtcagtttcgggtatcattcttcaggggctggtttttgagacagggtctttctcatagaacctggcgcttgccaagtctgtgagactggctagccatcaggccccctcctattttcacctccccaatgtgggattacagggcggttttgcctaggttctagggactaaactcaggtcctcatgctaatatagcaagtgcttttaccaactgaactatcttcctagctttaccagatagttatctgtttgataagtgtttcccaagaaaatgagctctgtctgtaaaaggcctaaaagcaacagcttgaataacttagtctcagtctttaaataacttagacacagcttcttatttgcagtgggccacatagctcctaagtatccttggaatgacttctagggatggcttgttctaatatggaggatgctaccactaatgttccttttatggaaagtaaagtgatccgagaaaatcatgggaagaaatggctgaaatctcatgctgaggttgaaaggtgccagggtcccctaggtggggagccccaatctctgaggagattgaagtttcatgtccttttgtgactttacctgttcaagagtctatgccacctccattttcctaataaagttgctttttaccctttaaaagaaaggcactgaggagcaccctgggctctcccacacaaagccctctcaagcagagagtaaccagaaatggcactcattcaaaatgatgagtcttcagactttcaaagcctgtctccagtgacacacacctcctagacttccccaaacagtgctagcaactggggaccaagtatccaggtaccagagcctatgggagacagttctcattcaaaccaccaggacagcaaacaaccaaagaactgttgcatttaatagaaattttctttaagaacatttacaagtaatagaaattgtccttgctatattcatagaaaggagaatagatagtgcatctgtctcttggtttattggaaagaaaaaagcaaccacctattttgtatacaggacattgtgttctaggaaaccatgggacaaagatgagccagacagcaaaatctcacttaaaaatcttccatcatcatcatcatcatcatcatcatcgttattattattatcattatcactattactattattattattagacagaatctcacttgcacccttccctggcctggagtgggctcactacaccaggctgatcttgaactctacctgcttctatttcccagatgctgggctttcaagtacactgtacatgcatgcatttttaaaaatttaagcatttaaaaagatgtatcaatatatttatagggacactgccttctccctccctccctccctccctccctccctccctcctcctccctcctccctccctccctccctccctctctcctccctccctccctctgttttctttttgtggcagggtctcactttgtagctctggctggtctgaaactcacatagatctgcctgcctctgcctcatgagtgccgttattaatggcgtgtgctatcatcaactgcccagcagtcatttgttaaaatagaaagtctgggctgcagataaaactcagtggcataacacatgcctcatacatgcaagactctgggtttgatcccagctcgacaaaagaaaagaagacagccctcccctgacaaagaaaccccaaacaaaatcaaaatcaaaacagtggtcatagtaaacaaacagcttggggggttcccatagttttatcttaatcctttcaggatttgtgtattgctttgtatggatgtagacaccttcttaacttgagcatctgccacccccaccgccccacccagtcccccacacacccatggccaagactttgcctatccctcctacacctctgtaactttttgatcctagaaataatatgaattgtagtttttttaatctttgagaattctgatctcttggagccagatggtgtttgctgtgggaatgtcccagaattgaacacacagggagggggagcaggagtcaccgatgcctcccagtgtgtgtaattagttaagtcacaacagtaggctacttcatgtttcttctgcgcacacagaatcgtcttttcctagccctctgcttctagaaggagtgggttatctagcctagtgtatcagtgggcattatcgtctttacctctggctgtctctctcccagagtttgtgaacagggagaaaatgccacattatctgaatatttttcagtacttcttcatctctctaattatcagcacagtattagccccttggtcctctgtgtgacaggcacctcctacctttctggccttgtgctatggtctaagttgtccctctgtgtctgctttatctataattgtcttcttcagctagtatgagatgctaggtcatcatttatgtcacttcagttcttttcgtttctaagaaaaaaattgtatttcaaatttgtttgcttggttcttttgatggtctattgttcattgataactaaactttcaatgaggtgttctaaattcttaaagcatgacctatgttttgtatactttttggtttgttgttgatgtttctcatactgccatttgatccctcagtttgtttcttgtgactttcactgtgtgtgtgtgtgtgtgtgtgtgtgtgtgtgtgtgtgtgtgtgtgtgtgcgcgcgcgcgcgcacgctcatgtgaactgtgaactcaggtttcttacctatctgggaaatctgtgaagcctccattcaagcatgtccattggagagaggaaccttgtatttcctatgcaggtggcattaccagtgccgctctggcatgtttggggaggatatgcagtctctttccataatgggactcatttccaaatctgaatgcaggcccattgataggaattctccagagtggtaatttctactaattccacaatattcatgagccgggcaagagtctctggggtccttctgtggaagtacattttccctctgctgtatcctctctgatcatccatccttatagattttttttttcttggtatcttcctgtttcggtgctttcttaggccggcctctctgtagctgtgtgctttcctgacacttctagcctttttagaggcagcctgcatttaacagatcattagacttaaagtaataccgctgtgttaaaggtctccctggatatctctcagaattgagttagcagagcaaatcccagcggtctgtttttacaccaagtgatacatcccgttgattacaaggccaagggtttctttaggtttaagatgtggaagatttgtcaaaggtcatttttgacaggagagagagaaaaatgggaggatatttttgaaattaaaaatttattatgttttcttgagaggggagaaggagggagggaggcaaaagagagaatgtgtgtgtgttcatgagccgatgctcacttctgtacatgtgtggaagtcagaggacaacttttaggacttgattctcttttccaatatctgggtcctagggattgaacctggcttgtcatgcttggcagcaagcgccttgactgccgagccatcccccaaataagacattatttaagaagcttcctaacaatgaacatgtatccagttttttagggcctcttactatgtgttttcattgaatgccctagcaccaagactgtcatttcttagaaggttttatacagacagaagcagcataacattttgagaaagacctgctttttttttttttttttttttttttcgtgccagctggattcctgtcgaattacagttttatttctggcattggggtattggcgtgtacttaaattgactttgtttgttgccacacagggcccaggcatggaggagctgatatgggagcagtacaccgtgaccctgcagaaggtgagttcccctgtgcttgctgttttcagttcatggatctcactcacttttgcctacactgttttgtttttaatctctctgaggtgggcagtgtatcgttggaactagctggtaataatgaaattgttggcaaaggttgcatgctctgtgttcttggttagattctgtttaccgggcagcattttgggggatgtttaatccattctcttctctccaggcagaggagattgtaaaagggaacggggaatgaaagtagccggtatttgtttgaggatgttgaagtaacatttcccaacatgcacaacccaagtaccctccttgccctctctatcccattttcccttctcatctttaagctggggatcgaatttataccttctcatacactaagaatgcaagaggtggcccttggttcagtccactgagctatactctctccccacctttttgaattatctattttacagcagttgttaagtccaaagtaaatttgaaaagactgtcttagaaatcaagagattcgctgggtgttggtggcacacacctttaatcccagcactcgggaggcagaggcaggcgaatctctgtgagttcaaggccagcctggtctccagagtgagtgccaggataggctccaaagctacacagagaaaccctgtctcaaaaaaccaaaaaaaaaaaaaaaaaaaaaaaaaaaacaaacaaacaaaaaagaaatcaagagattcaatacacacacacacacacacacacacacacacacacacacacacacacacacacacgcacacagcctccctctccaggcaagcccactaccccctcaactatctgcagtcagcttgtggtctacagtccttatcccagcaaagctgcccgcctgtcagcattagtgtgcttttctgggctccgtagagattaccttgctccaaatctctctaggttctgtcagtttctagagagattgtcagttcctcaaagggaaaagtttctgttgacctcaaaactttgtcactgggtcagagtccaagtgtcctgacttccagatcagttatcacaaattcttcagttgaggcttgcccatttaacttggggcatctttctgattcttgtctgtgccccttttaccagcatatcgtatatcctttgagttgtggtcttcagagtgcaaagtaaatggcctgaggattggtttggaagatggagccatctctgtctaaaaccaggtgctggtgatggatgctggctgatcccaagctatgtggagacaacccaggctgtttgtgtttgtaagcagtctgaacattgggcccccacgaactttgcttggataaagattttctcttaattctgagtgtggttttgtgtcatcaaccctgatttgggattataatgtcagtgtccctattgtatggtttacccttttaaacactgaagcaagatcatgtgttaactaggtttactggtatgcatagctaaatcaacgatggataataaacatttgtttcctttcctgaatgaacatggaaagcattcaatgctttgcccttttaagatcacaatactagtttttctttatttatcttattaattttttcattcatatgtatgcatccacatgcccatgtgtgcacttgagtacctgcatgccacagcactgtgtgaggtcatgtgtaggagtgacttattttcactgtggcttcaagttcctttatccactgagccatcccccccacccccataattcctctgtttaggttttatttttaaaggccatgtagttctttttgccctaaattaaaatgcagttccatctctactaacttgaatttaaagatgtaccatagtcacgttgtttgtttttgagtaagggtctcatgtagtccaggctagcctccaatttgccatgtagtcatggctagccttggattcctgactctgttgcctctacctcctgagtgctggaattacaggcatgtgccacatttggctaaagatatactttaaaaatacatttttcacacagaatcaatttttattgacgtcgttccagctcgggtcaaacgatcctgtgaatgttctacctggcgttgggcagcagattcctgtttagacacaagacagccttccctctcctgcctcttatgataaagtcagcctgggctgtcattcttttccgcctcccataaggctgctctctgtagataagcagtttccctttaggaacctgtcatctgaccacagtttggctttactttgtttttcatttgtttctgtaagcccatctgttcccaggctgtctctggttattgatttgacctttattttattgagtgcttgtaataaatcctgaaagccacttatggaaggattttttcatttttttcttctctcctaattctaatgaacaggattctaaaagaggatttggaattgcagtgtcgggagggagagacaacccacactttgaaaacggagaaacctctattgtcatttctgatgtgcttccaggtggacctgctgatggcttgcttcagtaagtgtcctcactcctgtccccagcccctgacagccctgtaggttggcactagacagggtattatgatggttatgtgcctttaaatgcacttttatgttacgtctggggtctttaagagttaggatcacaactaatatattatgtttcaacagtcaccaaactttggggaccatccagacatggagggaagagggaaatcctgtgtgtggactctcccaaccccataggaaggtagttagaatggtcagttgtaggtttaggaaccttttagcttttctgtatccccccctcccccacatctttccctctctcccttcttttctttggtgacaatgtctgtagcttaggctggcctgcaaatccccacacagacaaggatgactttgaattctaattcccgacttcccgcatactgggtttacacacccagtttatacagtgtgggggactggacccagggcttcctccctgctacagaatcatacctactgagctacatcctcagtccttgggaactgattctgaacatgcagcttaggtcaccataacaaaatagttaagaaaataacttagaggaagtccttatttattttggctcacattttcagaggtttttatctgtctcggtggggagaatgtaatagaacagggcagccaacaacgtggagtctgggaagcagagagaggggaagatgaagacaatacctgcccttcctggctttctcctttatttcctcaagcacatgggatggggtcacccacattcagggcggggtctatctaccccgcaattctcttgaaaacatccccacagacacatctaggagtgagctttactaatcttcttagtgcttgtcaacccaaccaagttgacagaattgactgcctcagtttccgagtttctcaatgtctacccaaagcgtatgtatgtatgtatgtatgtgtgtatgtatgtatgtatgttttggaattgagtgaagatggttaggaatgtgcctccatagtagagcacttagcatagataaggactggggttactatttagcagtgtccccctcctctcataaaaacccacccccaacagaaaactaacacccccccccaacagaatttaatagcagaaaaatcatgataggtaaactcaagttctccagctgccagcctgtattctgaagagggaactccactttagcagatggaccctgaatcctatcaggaatgaatttgaggataactatgtggctacattggctggctggatcattcaaaagttgaatttgtgtgagatttaaaaatctctgtgctctcatcctattagttggtagtcttatcaaagttttaagagtagtataaaaattttaagataactttgaatgagcctaagtgataggattaaagtttcttcaagaatctgaggcaagctgggcagtggtgctgcagcctttaatccctgcactcaggaggcagaagcaggtggatctctgggtttgaggccagcctggtctacaaagtgacttccaggacagccagggctacaccgagaagccctgtctcaaaataaacaaaaataatgtgaagcaatgaagccaggcctgattgtgttcagaaataatctcaacattcaggcgatgacggaaggatcagctgtttaaggcctttcctggctaaatagtgaatccaaggctatacgagactcttctcaaaacaaaaaaaagaatccaaggcaagtttctgacctctttccctccagacattgcacaaatgaatgtgtacttgtttcaagacagtacatgtgggctttttacagctcactgtgtgccttagaacataggactgtcacttccacactgtctcattacgccttctgatgtgaccctgaggtctggacaggtcttttacacaatcactgtggttcttagtaaacacctagaagctgaatgtgtggcttctggtgtcttacctctgagtggctcagaccaagttgggcttacttgggagccgccacacactgagccccttaatcagcttttggggctcatttactacttctgttttctctcaagggttcaggccgattcaccatatgttttttgactgatgtttatttttttgtttacagagaaaatgacagggtggtcatggtcaatggtactcccatggaggacgtgctccattcatttgcagttcagcagcttaggaaaagtgggaagattgcagccattgtaagtcctgtgatagcatgtgagatgtccccccactctctctctatatatatatcaaatgtccttatacacataaactgtaaataaatattcttaaagcttttaaaaattaagaatttgtttattggaacataaagaagggttggcgagatggctctgtggttgaggccatattgcagagaacctaccgattttaattcaagaacatttgttttctatgcccaaagaaaacaaccatttgacagttgcatgacctagggcctgcttgcttcttggaatcttgatcgttttctgggttgatgttccaggtgtgaagctgtgtccgagttgtcctctcaaggaaggttgcaagggttctacttaatgcctgctgcacatatctcctaagaacagggccatcctgttgacaaacctaagaaaaccagtaactgcagagccatctaatacccactccatgtctcaagatggctttggaaaagtcatctcagatccaagtgcactccttataattgattatctctttagtcctttttttggtctggaagggatacctcttccccttatcttcctgtaacaagagtgtgagcaattaaatacaaaatttctcacttcctgggttttcatctgactttgatgaactgaccgaagcctttggggcttttcatacttagaaaagtattccaaagcactgtactcacagcggcagtcgcttttcttggtctacctttgtgactttgtgagttgtgctttttttttttttctagataggaaccttggggctgggagggttggcagggatatagatgtttaagggttgtaggatatatctatatctatatctatatttatagatatagatatagatatctgtatctatctctctctatatgtatcccttccatacactgaaatctagagagggacagtttcatagaagctggaaccaaggacattgccctcccagttctctctgtttgcactgtcctacatctgctctgtttgtctcgacaggtggtcaagaggccccggaaggttcaggtggccccgttgcagggcagccctcctctcagtcatgaggaccggggttttgaggtgatagatgaatttgatggcagaagtttccgcagtggctacagcgagaggagcgggcacagcaaccatgatatgctcagccacagctgggaggacggcagggagagggggcgtccccagccccgcacacagagccgggagcgggagcacagccgtggccggagcctggaacgcggcctggaccacgaagactatgggcgcagccgggaacgcagccgtggccggagcctggagcgcggcctggaccacgattttatgccccgggcccatagccgtggtcgcagcattgacagggattacgaccgagattatgagcgctcctatcaccaatcctatgagcctgactatgagggaggctacatcccattatatgaccgcagagcccagtctgaggctcgctatgagcgcagccacagccgcgaacacctacgctcccggagccccagccctgagcccaggtcccggcaggagcacaagcatgatccagacaggcccatcggggtccttttgaccaaaaacaaagcaaatgaaggtaggcgcacatgatgtgggaatgcaagcagtggtgccaatatcgtctggcactcacccagcacctaccggtgttcagcatctacctgaactggcagccaacagtgggctcatttattcctcagaactacattatgggcattactcttgggtccttgttctgtggtatgcagacagagacgcggaagggcccactgatctggacacgggtgtctcaatgcctttgcttcagacaagtacctcaaccgcgtacttattgcaatgaagattctcaggctctgctggtgaccctggcggtctctgtgggaaaacagagcagaagacagtacaccagctcttcttgatgaagttctattctgggccagggtggtgttgagtaaatactctttagttaatccccccccaaagaccttggggtagggagacctccttcccgtgttacaggtcaggggttttggtatgtgtgtggaggttggctctggctgagtctgctctcctcacactgcattcctggagatgtgggcacacttaatcccattccaggattcattcactctgcagtgaagctgttagtactatacatagaggaggactctgaagcccaagaaatgggaagctggaacccacacttagctgatctgaagccaggagatgaacaggagttgagccatttccaatcttggctcttgtcctcctacttttaaattttcttagaacatagcttttgtctcgttggttctcttactgttctaagccgagaaacgtgaatgcaaggtgaaaggtccggtgttctgtagcttggggatttgcatttatgaggggattttagacaaaagagtctgtttactacatttttcctacttaaataactggagtgatgcagggtcaggaatggggtacccggggcataggggctttgtaagctgaggttgcaccatattgctgaggagaggggcatgcttgtcagcaactttggaagcatgaagatttcacagaatcttcatagctatgtgtcaggaagtgtcccttcactcgtcctcatgctggatccagactgaaaggtagacgccagagatgtcctgagagtgagcaccaggcagggacctccttccaagaggtctgacccattctgagggacgttgcttttcagtcctttcctcctctttccctgtttccacccttgcctcttcttttatgtcctcctgccgtaggaataaccatgtatgtcatgcaatcatggggtaccttgtgttagtctgggttctctaaaggaacagaactgatgggatgagtgtgtgttcgtgcgtgcgtgcgtgcgtgcgcgcgcgcgcgcgcgcgcgcgcgtgtgtgtgtgtgtgtgtgtgtgtgtgtgtgtgtgtgtgaatctgtgtgtcacggtgtgtatacacacatgtgtgtgtaaaggggatttcttagagttatcacaggctgtggtcctggtggtctaacaatgctgtctcccgacactccctcctagatgcggtgttgttttcttttgagaacagttcaaagtgccgctgactgttcgtacagtgcttcacgggtggctctgccccagcttgcaaaccacgggtagcaggaattgttgcagatgatgtgcactgtttcttcttcctgtgggcaacctcggggtcagcacaatttcctagtaagatggatgaagcaggtctttgccaccaacattttacttgaaaaatgttccctggggctggaaagatggctcagggtttaaggtcactgcccattcttccagaggtcctgagttcaattcccagcaaccatatgatggctcccaaccatctgtaatgtagtctggtgccctcttctggactgcaggggtacttgcaggcagaacactgtacacataataaaaatctttaaaaaaagaaaaagaaaagtcttcccttttacatcattcacatagcctctgcctagtttgaccgttgttagcattttgcaacattgtcttcctttctcctttttttttctgcttgtctttctccacttcatcctctgcctccaatcccttctctctctctctctctctctctctctctctctctctctctctctctctctctctctctctctcctgtctctctgtctctctctctctctctctctctcacacacacacacacacacacaaacacacacacacacacacatacattctccctctccctaccctccctccctcttaaagattctaggccaatttaacagtgtatcccatatgaaaactaaactttcataactttttgcagtagtcttcaaagtctgccttacattttctgaataagttgaggacatgtgccttcctttgtttgtcttctagagtatggtctccggctggggagtcagatcttcatcaaggaaatgaccagaacaggactggcaaccaaagatggcaaccttcatgagggggacataattctcaaggtgagcagacaaggacagggagcagtgtgtgcctgcatgcattcctggtctgcacttcggcatccacaccccagggcccaatatctgagtctcagtggccaggagtgaggtagagagaagagcagtgctgtgaggtggtctctgtccaaagaacaaaaatacactgagacactaggaatgcagctcaggagcagggctcttgcccagcagtgtgagacctgctacctctctcacccaccctcccaaaaaaatttaaaaaggaaaaacaagccttagaggctgtactaattaaataacaaaggaaaaaaacctcaaggaatactttgcccttctccctgtagatttaaagtttaggttcctgttcctataccaggggaaggtgagcctgagaacccttaatctgtgattgctgaatgcttgatagtttttacaaacctctccgatcaggaagcgtggtccagcagtaaaccagtctgtagtcttgaacttggaagttaaatagatgagcagagtaaacaaactatacactgactctgttgtgcctgttgtgggcatgtgtggttatatttccatgtaaaggataattcgttttcattcagtcatcctgaagtctggtctgagtatttcagcaactcccttccaattctataaaggaaaataagtgctttttttgcaaagctgtgcatagttgtcctgcatatgaataacatctctggtcttcatcttcacagatcaatgggactgttactgagaacatgtctttaactgacgctcggaagctaatagaaaaatctagagggaagttgcagcttgtggtgttgagagacagcaggcaaaccctcatcaatgtcccatccctcaatgacagtgactctgaagtagaaggtaagaaggggccctgcttggaaaggactcctagttgggccactgagagcagaacttactagtgatgatagttgacaatttgctaagtgctcatgcacacaccaataaagtactttagtgccttaagcatgacagaagcccagcatggtagctccttgaaaccctcaaagaaagaaagaaaaggaaaccaaacagcaacaaaaacctgtgctcctgagtgcatgttcttttcttcctggggtgtttctttatcttaactccagtgcttaaaattcatgttaaaatctcttcataaaaagtcgggcattggtggcgcacgcctttaatcccagcactcgggaggcagaggcaggtggatctctgagttcgaggccagcctggtctccagagcgagtgccagggtaggctccaaagctacacagagaaaccctgtctggaaaaaccaaaaaaaaaaaaaaaaaatctcttcataaattccaactttgcttaaaaaacaaaaaggctgttagtactgtacctttagaaggtagtgtgacccatgaagccacactaaacaatctgtcaaaacagctcaatattatagtgcacgctatatatatatatatctgtatcttactaatatatggccctgttcctgcttgttgctactgtttgttttgtttaacttggataaatgcatttattccagtttcacatattatttgcaagagaaggaatcaagtacactaactgcccttttaatgctaataaacacttaggttgaagtacaggaaccagctccaagtgtttgttccttgtcagagtaggtgtggtgtcttcaaattgcagagtgaagattgctgccctaccttccaaggatgttttagaaaagtgatttgctaaggagtgcagtaaaagggttgcaaatactccctcacatgcatatcctaaaagcaatgccaactaggagatgggctcttgtcgtgtaatacttgcagattgtggctatagctcaggagagggcttctgtagcatgtgcatgctccctgaggtgtgattccatcccagacccacagttggctcttccactgaccccttgttcagactactgggtgaaaatactgttgtggactggcaagatgactcagcaggcaaaggcgcttcccagggatggctagtgtgaaccaacatgcctggttttgaaagttaatttcatttctagtatatcagaagtctgctcagttcatctggactatgagtatagtacaggaaagcaaagagagcaaggcaactgattgtaggagtttacagtttatttccttactgtcatcatgtgattccctgtacagccttagtgtcggggagcttgattctaacaagatccccagatggtttgaatatacattaaaatttaaggggcactggtctgtttggcaagagtggtttctctagtctcagattcgggcaatcatgggttgaaaatatgtgagaaaagaagttaaagtttcttcttcttgttattctatcaacaacacagcgtaactgctgtggatatggcatttgcagcatgttatgtattatagataaaactatgcaggcgatcgtgggtaggctgcatgctaacgtttaacatcttacacgaggaacttactcatctgcccagtttggtctggaaccaatctctacagctcaattgtggtcccccttaaaacagctttgcaagcaagtaggatgtgaggtgtgccgtctaaattagatgacctcttcattaaataatgtctctctctctctgaaaattagcaagtcttttcttctcccttagtgaaaacaaacatgtggtaagctgagagccttcccttttgctccctgatcagaggatagttaatttggggtatgtgctcatttcactgaaaaggactttccttattttgaaatcagatatctcggaaatcgagtccaaccgatcattttctccagaggagaagcgccagcagtactctgatcaagactatcattcctccaatgagaagctgaaagagaggccgaggtaaggcagtgtgggcttttgtcactggcaaatgcacctgagtgtgtttcgtgaatgtgtcatctgctgactcatgatcatggtgtgtgcctcagttcaagagaggaaacctcaggccgactgtccaggatgggtgccacacccacgccattcaagtccatgggagacatcactgctgcaagtgtctcagaggccaacaaggagcccaggaaccaggaagaaaccccaggtaaggttttaacgtcgtgcgtgcatgcgtgcgttcgtgcgtgcgtgcgtgcgtgcgtgtgtgcgtgcctgcctgcctgcgtgcgtgcgtgcgtgtgtgcgtgcctgcctgcctgcgtgcgtgcgtgcgtgtgtgcgtgcctgcctgcctgcgtgcgtgcgtgcgtgtgtgcgtgcctgcctgcctgcgtgcgtgcgtgcgtgtgtgtcttacaaagctagttcatgctaagcatatgttcccagcccggtaccaggtactgaagaactgaattcagaaatatgtgcttgatatttccagaatgtggattttaataaaagcagaattatttttaaaatttgtaaagtggaacaggccctctttatttttttcttttaatgtgggatgcaacctttttaatatatcatcagaattggtcacattttgacatatttgagttacagtcctcttgccctctgtccacaaatccaacatcatcaccctaatctttcctaccactctgaagttatcatcataactctagttacaaacatttatatgtaggcaaacatggtattgttttcaggctataaagagcactgccttgtgcatatgtaccttgtgttttgggtgtttcttttctctgactttgagaaactatgatgaatgctaatgtcttcaagttaagctttgtctttaagccttcctttatttatttttatttatttaatttttttgtttgtttttgggacagggtttctctgtatatcagtcctggctgtcctgtactctgtagactaggctggcctcgaacttaatgagatccacctgtctctgcttcccaagtgcttgggattaaaggcgtgcgacacgaccacccttctctgtctctgtcttctgtctctgtctcttaaagaaataaaaatgaggacagcttcagaaaggggaagcacttgggaatgggagtgggctagtgagcagggaaaggtgtgtgctgttgtttggtgggatggtgaaagcatggcatatggcacacttgaagcctgtgaatattgttgtctctatattaaggaacaagctcctgtgggtctggcttttgtcttgtttggtgtgatttatgttcacagtatggggcttgaatccacagcctcctgcatgcgaggcaaagctacacacttagctacacaccttcaatccacactaaacttttaaaatccacagtgcctgggtactggggagatggctcaatggttaggagtttcccatccttatggtagctccaaccctctgtaacgccagttccaggggatctgatgccctctgctggtctcaacaagcactgggcactcttatggtgcatatacgaatatgaagaaaaatctcatatgcataaaataaaaccaaataaaatctttaaatccacagttcctcaacccagaacagccccaagaacttttcttcgtcctagtcctgaagatgaagcaatatatgggtatgtacttccattactctctctctctcctgcccattcctcttccattcagcagatctgcgtagctgaaatccacagcaatggtgtgcttcctcctgccccgccccagatggcgggtttgcatctactcagccaccttttgtcaactcttattcttaatgttcataaggaagaggagtcgcttatgagagaagcaaaatctgggatcgggtgaactctgtttacctacccatctatttctcctctcctgtgtgttctcctgaatatttgctttgtccagatgtctaactcccaaccagatgaagcagctccagacgatagtgcttcagtcaagactgcaggggtgtggtggtcgtgtgtgctttgcggtgggggggtgggcgagaaggggtaatgttgaatggtgtctagacagctgttgttgggttaggaccagcttccttggatctgaactgtctgtatttgactaaacttggggtagggtagactcaggaggacatcctcccatcagatagctgcgttaatccctaattccatcctctcatcttcggtgggctaatgtggtaaattctgtggttttccttctttgtggactgatagacattcctttcactgtcccagggagataaaattagaggacagatgagaaaattgggagggaacgtttgtagactgtgatgtcccttctgagctagataaatagttaagtctttaatatctccaatgcgaaccctccattttaaaaagtgtttttcatcttccctttctgaaatcaaacctatgacagccctaacaccaaaatggtgaagttcaagaagggagacagcgtgggtctccggttggctggtggaaatgacgttgggatatttgtggctggcattcaggagggtacctctgcagagcaggagggcctgcaagaaggagaccagattctgaaggtaaggaagtctgccttctagcagtcagctgggcaggggtctttccggatgtttttcagtgaagtaattcttataacagcaggttcctggttgctgtaatagtttggcatgctggggagcagtcattgggatctggaatttctttctttttgtcttttttttttttttctttttaagacagggtttctctatgtagccctaactatcctggaactggctcagtagaccaagctggcctcaaactcacatttctttctttttctatgtgcacacatatactaacttaggtagaaaatccacatgccattaactggaggtccggtgagcactctttggcccaaaggagaagggagaagaagttgcagaatcactcagagcatcaggcttcaggacacaagggcacacccatcctctgcggtgatcagattgttctccagtgtgggggttgccagaccttgcttatgagcaggctttccagcaaaactctaggactttctttggctccaggaagggttctagaagactaccagagtgaaccttaggggaacacataattccaggacatccctccacccccagcttcacatgctgctgatacaaatcttttcaaatgccagcacgtactaattggtaaatacgctaatgaaaaggaggcatgtttcctgttaccaggaaactcgaggtttagaattttgcttttaaatttgaagaataaaatagattcatcttgtggacaatctgtgtgaatttttatgaagagaagtagagaattcacctagggtctcaggctcccaatttctgcataaaactttgttaaaggcaaggagagttgcttccgtgctcagaacttttctagaaagatttttttttgtttttgtttcctggaatcaccatagtgactagggtgatactagtgggtacctgacttctcttgcagtagttctcggcagaggccaggcagcaggtggctgactactctcgagctgactacaagatctctttcttttctgtaaaaggctgagaaagactgcattccctgagctaagcagaggggcagccacagcacagtgagctggagctgatacctaatcctcctcagactcagcacatccagccctgcacactgctctcagataatgaaacatgatatttatctatttgtctgttggaaaggaccacacagtccgaccttgaagtacagaaacgctggcctaacccttttccactttagtgtgatccacactccttggtcagcctgatatgaagggaactgcatgtatagcctggccattattttttttttgttgttgttgttgttaggtttttaaggatggctctgcctttgtaggtaaggcctggcatgtgcagcctgcagctgaacacaggtcttccacacagcagaaataggactgcttttatttcttttcctgcttggttttactgcctctttggtatttaaatggtgtggctgctaatttctccttaaaactgttacggaatggaaaagacaaaaagaaaaccaaacacatttttgggaaggggaatggtggtggtggtggtggtggttaaatcacatggatttttaaaaagtacatcttgtacctatcatgcatgtggaagtcagagggcaccttttgggagtcatttctttccttccttggtcaccaggcacacatataatgcagagagatagatacaggcaaagcactgttacgaaataaaataaattaatttttatgcatcggggcatggaactaaatacttgtcaaataaaggcatacaaatggacaagaaaattttattttcaaatgttcaacatccatagccatcagggaagtgcaaattaaaaaactacttcctggctttctatgttaccttacagcatctttctgtagagtctcctgaaggacggataggcgagcacttaatgatacagagacagatacagaaacaccctgtttacaaacacatgtgaaacatgtttcttttgctttgcttttgaggcagagtaccaccgatcttgaagtcatcttcatcctgcctcagccataagcaccgggatcacagccatgcttcaccatatctagagttagataggttccaactgattggagccagaggagagaggttgcaatgatctgtgaacatgtagtcaagattttacttgatttaatttttgaaaaagtgtggtgccagatctgtttatcacagacccctccattcaatattgattttagttatctgtttgttactttgatattgtacctttctggtcacctgtttgagagacttgaagaaagggggacagagagaatgacaagaaattctaatcagttcagtggcgaattctttttttctttttaagtcagggtttctctgtgtggccctggctatcctggagttcactttgtagaccaggctagcttcaagctcacagagatccacctgcctctgtccctaagtgctgggattaaaggtgtgctacaccactgcccagctcagtgacagattcttaattcttaattggcagatgagattgtatgtagggcactgaggaaggaaggtagagcagtagtcatatagtccaggccaggagaaaggtgcaatggtatggacttgcacacatgctgcttctgctcttcataggccctagcggactcagacagagacttaggagataccatttaaaattgttggtactactagggattaatcctagagctttgtttgtatgagccaagcgagtacttggccactggggtatttccacagccccatcaaaaccccgccccattcgttatttatttctggttttttcttccttcaaggtgaatacccaggacttcagaggactagttcgggaagatgcggttctctacctgttagaaatccctaaaggtgaaactgtgaccattttggctcagagccgagcagatggtgagcaagtttgacaatctgtttttttgtttgtttatttggttggtttttgttgttgttttgttgttttgaggggagtgaggggagtgggaagaaagaatgaggtgtctcaggaccagaaaaagcaacattgtatcacaggtgtatggagaaaatttgggtactgttaattttttttttttaagattttatttatttattatgtatacaacattctgcttccatgtatatctgcgcaccagaagagggcaccaaatctcataacagatggttgtgagccaccatgtggttgctgggaattgaactcaggacctctggaagagcagtcagtgctcttaacctctgagccatctctccagccccgggtgctgttaattttgtgtgaagaatgttttcctccgtctactgaaatagtttagccagttctgtgtcatgtggagttaacctgtttttctgaacaatggtgcatcctcagttatgatggaattggaattgttacagagtctccatgtgacaggtggcattggctcctctgaactcttcgccagtcttacaagttgcttcacccttccagggtcctctcctgtaaagtggggggcaagaatagtcccttcctgtttgtgtcaaaatattgatgagcaactgtgctagtcaggggtcctcagaggaacagagccaaaaagatgtaaaggacttggttggcgtgaatgtgcaggttggcgagtcccctgttgggcagggtgaggtaggaagttgcagacctagcacaatcaaagactgggtgggttttgggtttagcctgactaacttgtaggagaactgatggtgtacatacagtaggagaaaagcagatatttcagccggaaggctattggtgggaagagtaacagaatattctaaccaggctttcaactgggtgaggctctacccttgttaggaagaacaatttgttttacttaatctacctatttgaacagtggctctcaaccttcctaatggctgtgacccttttagaaagttcctcatgctgtggtgaccccaaccataaagttatttcattgttacttcctaactgtaattttgctactgttaagaatcataatataagtatctgaatgcaggatatctgatatgtgatccccaaaggggtcatgatccacacatgttgagaaccactgcatttgaatgttaattttatttcaccatcacccaccatatcctctcagaaaggatatttttaatcaattgtctaggcatcccatacatcgtcaggttgacacaaaatctactatcataacacttcaggaggttaatgatttttgcttcctcctgttggaacctgattcccataaagccgtatgataggaatggagggatggagatggggtgacttggtaaagatcttcatttaagtccagcacagctaacaatgcttttgttttccagtgtacagagacatcctggcttgtggcagaggagattcatttttcataagaagccactttgaatgtgagaaggaaactccacagagccttgctttcaccaggggtgaggtcttccgagtggtagacacgctgtatgatggcaagctgggccactggctggctgtgaggatcggaaatgagctggagaaaggcttaatccctaacaaaagcaggtgattgagactgtactttcctaaacatatcttgtaatcctgttcccatcaaaaggcaacagttctgcccttaaggaaatcccatgtgacgtcatcatctgtcaccatcagtggttatgggaacagagctgcagtcgtgagcatctcagacttggttgttgcacttgcctcatttttgagagttgcctgcttcccttcttgtgggaaacaccgtgtggccatagcaaccccagcacacctcgtctccctcctcaccttcttgggagaggcttgcacaccctcggaaacacttgttggtgtgtggcagtgtagaaacttaagaaaggtgaaagatgatttgattactacacccatgcatgtgttcttactatataccatatgagccaagtgtggtgtgttctgtactgagctattgattgtggaattcagagacctgttgggcttctctcatatgacaaaatatgggggagagggagagagagaggggggagcaaaagaggagagaaagatgcatgtaggccctcaatttgcattttcctttgtattcagtctggactccagcccatgggaaggtgccatctatctattcagggtgttttttccctttctagaaataccctcatagactgacccgctggtgtcttcccatagtgattttaatctagccaggttggcaatgaagcttgcacactgccttttctgcctccacagtccccttcgttgtctctgttgtcagtctgagtcagccctgggttctcacatgatactggctaggtgtcaataatagcctgttcacatgctgtggagaatgacgcttcctggcctcttctctcagagctgagcaaatggccagtgtccagaacgcccagagagagaactctggagacagagcagacttctggaggatgcgcggccagagatccggggtcaagaagaacatccgaaagagccgggaagacctgacagctgccgtgtcagtcagcaccaagttccctgcctacgagaaggttctgctgcgggaaggtgaggcagctccatgggcctaggagagatctgttgagctctgagcagttgtaaccaccgagttccaacttaacctatgtcgcctacaccaagggtgtagtgagggaatcatatccatcaaggcctcctgagtggaggcgaattctcgaaatgtagaaaataattttaaccctgacacggaagtatttgtgtattgtcctctgcgtagggatgcgaagcaacagagtaccagagaataagtgaagtttctactaaactctgttttgctgggaagggtgttgaaggcttctaattcaagaaagcactggggtcagggtggaggtgggagactccagtttcttttgctgagcttgagaagtgtggacagtacctttgcctctcgcctggacatggtaatcctgggtacatgcctgatagctgttctctcttcctttcagctggcttcaagagacctgtggtcttatttggccccatagcagatatagccatggaaaggcttgccaacgagttacctgactggtttcaaactgcaagtgagtccgctaatggagttttgctccccaagtgtttgtttggaaagttttctggcacacgaaagttggaagaataatgaatatccacacgtcctgcctggagtcactgtaccatgttgtcagataccctttctctccaccccctgcccagagacagacacacctccccccctgaaattgtgtgctgagccagttcagtgtttaaattgccaattgtgagactttatccacgagcatatgtgcgggtcttcctataacaggagtattcttttacgtaaggaagagatttaatgttaatgttacagtttgaatgttgctaatctgaactattccaagaatcgaaactttttgattgtcaccatgataggacaagtggaaaattccacccttgctcttctgcgaaagatcagcctctaaatgcatatgcactaaaaatgctccataaatttaccttcagttaagcctagtggtggtggcacatgcctttaatcccagttctcaggaggcagaggcaggtggatctctgtgagttcaagaccagcctggtctacaagagccagttccaggataggctccaaagttacacagggaaaccgtgtctcgaaaaaaacaaaaacaaaccaaataattaccttcagtgtgtatgagacaggcatgacagaaatgaaacttttctttttttgagcagggtccctcagatagcccaggctggccctaaaattacgttgtagctgaggatgaccttgcatttctgatattcctgcctccatctcacaagtgctggtataatgggaatatgccaccgtgcttggctaaaccgtgaatgaatctagtatttagatgtgggtctccttttgtcagatacttaaattatgcatgtgtaaattaaaataggtagcacttctggtcccaaatattttcgtttttttaaattaaggctcatccgttgatagttaggacttttatattcctagatccgtccttttaaaaagagtttcttggaatattgatgcttggagaatacgtgccagtcggggctaggcataggttgacctaacaatttcttcatggttagatttccatttactagtgctgggtttgtagctcagtggtatggcacttgcctcatacgagtgaaaccctggtgtttatatgtgaaacacatgcatacgtgtacacttgggcatgtgcacgcacacacacagcaacacacatggtttcagttcaatgagtggtgtgatcccatctcactgcatgtcatgagatgatggctcgtgtcaggtgtcccactgtgctgatatttggggcatctggttgtcattgtttccatcagcattacttagccccaccccctttttcttttgcagaaactgaacccaaagatgcaggatctgagaaatccagtggagtagttcggttgaacactgtgaggcaaattattgagcaggtgagaaaactcatcaggagcccatattgtcagagaactggattgtggtttggaatagaatgtgtattttaataaaaatgaggggctggaaaggtggctcaaaggttaagaacagtggctgcttttccagaggacctgaattcaatttccagtacccacatggcagctcacaactgtctgtaactccagttccagggtcttcaacaccctcacccagacatacatgcaatcaaaataccaatgccgataaaaataaaaaggaatcataaaaatatgtagaaaatactaatgataaaagcttatataaattggagccttttcaacatgtaagccagatgctgtcctgaggcagagttcctatcattaaaccaagttacgcttattagaggggaatatatcttagtaccctgctgggtgtctgaaaccatggagagtaccaacactgtgtgtgtgtgtgtgtgtgtgtgtgtgtgtgtgtgtattacaggtactttttcttcacatgtatatctgtgacaatttaatttataaattgacatggtgggagataaacagcaataaccagaaccaagatagaccattcataagaatatactctaataaaacttaaacaaatgtggcctgtctcctcattcccacttagaaccttatactgtcctcacctttttttactcactgttggactcgggagaaactggaggacaaagccatggactaggagggttctacagtcattctctaagaaattttatctcagccaggaagtggtggtgcatacctttaatgccaatacttgggaggcagactcaggcagatctctgtgagtgtgaatgccagcctggtgtacagagagagttctagaacaaccaaggccacacggagaaatcttgtctcaaaaaaccacgggggcgggtatctgataatatggaagtggatgtaatatggaaagaaatatttttggctttttaattaaatatacagggtaagatatggcctttaatcctagcatttggaggccgaaggaaggagatctctgagatcagggccagcctggtatacatagtgacttccagccaaagctacacatttaaatatacacactcattttatctggtatagtctttacctggggaaacaagcccattgatagtatttcatgtcacgacatgccatcctttctccacttgtgacaggacaagcatgctctgctcgatgtgacgcccaaagctgtggacctgctcaactacactcagtggttcccaatcgtgatctttttcaacctggattccagacaaggtgttaaaaccataagacagaggttgaatccgacatccaataaaagttcacggaagttatttgatcaagccaacaagctcaaaaaaacctgttctcatctttttacaggtgagtgaagtttaaaaggcggttcgtgctcaaaatgtgaaataatctgggtgtgggatatggagtcctgctcattcaagaagagtcagatatttagacttacggcatttgtatgttaaactttatgattttgatagccagaaatgattgtaaagatccaagacatggtaataacctggtcatctcaataacgttagattttcaaggctaatgagtgaacctagcttatcgccaagttcccatgtctgtggtaactgcatgttacttattgtcagtgatgcattgactgactgtgggatagccatagtaactgacagtgtctcccaaatagaaacctgaacactctgacaataaagatttaaacatttgttacttctacttttttttaggtgtaataatactgtgaatgtgttttccttccttccttccttccttccttccttccttccttccttcctttcttccttcttctctcttttttttaaagatttatttattgtgtatacagtgttctggcatgtttataccaaatctcattatagatggttgtgagccaccatttggatgctgggaattgaacctaggacctcaaccagtgctcttaacctctgagccatctctccagccacccccccccctttttttttttttttttttctgaggcagtgtttctctgggtagctttggagcctgtcctggaacttgctctgtagaccaagctgacctcaaactcacagagatcctcctgcctctgcctcctggagtgctgggattaaaggcgggtgccaccatcacccttttgtgttttcttctcttaaagattaccctaatgttttagagatacataccaaatgaaatctttataaatgatctactaggcaccctagaatttgcacagacaatctgcagcgagaggagaagatagtagatagattggccaaacaccgtgactcagatgtggtgctgcatacatgagagtttatagactggccaggcactgtgacacagatgtgagtgctgtgtacctgtgtacatgtgagtttatagagtggcctctactttatctacatataaaatcttccaaaattaggtattttttgaatgccacaaatagacacattgcagctattactcacgatggtaagatggtctaaaatatgacatttttaatgtactatcttcatagataaattgtgtgggtatgctataatagagaatttaagagtcacagtttttgtttgtttgtgcaatgctttattttgtaggaacactgtactacccagatgccacttttttagtccagtgacgttagaggccagtgacagttgtcatcaatcattgatattttgggaagatcaaggtgaatggatatgtatccacactcagtgtttactgtagtttaacttagcactatggtgagagttgtaactaagagagtgtaaccaaatgcaccagagaagttgttctatcattggctaaagccttatccatgggccactcctgtttttggttttttgggttttttttttttaaagatttatttatttatttatttatttatttatttattatgtatatagtgttctgcctgcatgtatccctgcagtccagaagagggcaccagactacattacagatgattgggtgccaccatgtggttgctgggaattgaactcaggacctctggaaaaacgggcagtgctcttaacccctgagccatccctctagcccaccactcctgttcttagtgagcctctaaaccgaatgttatagatctatctttacagtttgtggggtttattttgcgtacttacccttgtatcttccttcatttttacctctagcagtactaatttactttgtagtggccatgaacagcaatgctagtctgacttgtgtgacgcctaatcagtccggtaggaacttgtacagggtcccagaacccattgtagttgagcccaggctaaaactggttttcctgactacatctcatgtaccttacaacccagctagatgattcagatgccagaagtgtgacgtgttggttggttatccattgtctaaagtgcttacaaccagaaatcatattttagattttggagtggttttatgaacataactgagcattttagagatgagactcaagtctgaacattagattcatttctttttcactgagtcatagccacagagcctatgggtggtttgctatgatcattttaataattgttctgtgtatggcaatttcacagtgtgggtttctttccttgggcattgtgtgcattctcttgacagtttcagatcttgaagcattttttagttgaggttttaaattagccagtactatattaataattcctcattttaatgatgagaaacggactcatttactccccctaccccccatacttttgttcaagtcggctgaatggctgggagcttcctttagagagtaaggttttgagttttatgcaagaatgtgagaaatccggaaggagaatccagggttatggaagaagaacgaagcttctggaaattggacaaggaggacagctggccaaaggtagctggtacctctgggtgctccatgtcctagctgggagtcagcattgttggttgtggagcacaggccacagtcactggagagatcatacatgtagaaggatttgtcatgattgtaaaatgcttgaagagagaaacatgaccgagggcagcatcaggtctcagattgcctctgccctccctccctccctccctccctcccctccctcccctccctcccctccctcctccctccctccctctcttagaaatttattccttttctgtgtatggtgttttccctgcgtgtgtatgtatgtaccgcattcgagcagtacctgaagagaccagaagaaggtattggatcctctagaactggagttatagtttgctaccatgtgggtgctgggaatcaaacttgggtcctctgggagagcaaccagtgctcttaaccactgagccacgtctttagctcaagcacatcctttctgatataagatggctgaggagcaggagatccagaactcaagctgggggtaggagtagacgtacgctaagtattgaagtccatctagaaagtgtttgtcagccttcctaacgctggcaccctttaatatagttctcatgtcgtggtgacccccaaccataacattattttgttgctacttcataattgtaattatgctgctgttgtaaattgtaatgtaatgtacctgatacgtgactcctgtgaaaggttcatgacccgaaatgattcaagactcacaggttgagaaccactgatctagaacttttaagagtccagatttctcagtatgttgtctctctgtttcagtgagctatgtagtcttcaggacagatggtacagggttgtagatagtttggaccaagaagcccctgtttcatgcaactatcttttatacgtttcttccaggcttgtaaacttgactgctgaaagctatgtagagactaccccaacactttttattgcccatttcaccccaagtctgtccacagactgagattggtgatgtgatttgtgcttgaaacactgttctgtttctgttttgaaaagaatattttgttctgtgagtgtgtgtttaaaaatatatttatttaatttatgaatatgaatactctatctgcatgtttgcctttatcccagaagagggcatcagatcccactacaaatggttgtgagccaccatgtggttgctgggaattgaactcacaacctctggaagagcagccagtgctcttgaccaccgagccatctctctatccctgaaacactggtttttaagcatgattagcagaaccaggagcagaattagcattttcttttcttttcttttctttttttggtttttcgagacagggtttctctgtggctttggaggctgtcctggaactagctcttgtagaccaggctggtcttgaactcacagagatccacctgcctctgcctcctgagtgctgggattaaaggcgtgcgccaccaccgcctggctagcattttattttctatgattttaatgcacagaatctttatgagttagtaagtgggattatattttatgtcttatgtggtcttattagctcagtatcctagtccctgtttcttttttatatagtaataagaaaactttcccacagaagagattttaattgtgacaatattaaaatcttttccattatgagctttgatatactcttaattaagacactttattcagacttgctaaaaagcaagttggcttgtcaaaatattttaaagagcctgtatactctttctcaatgaaaatatttagtataaaatacacttatgcatgtatatcataaaaatgaaatttcaattgcatgtgttcttaggaccttcaaagtgctcggttcatggtttaatgactgttgtggtgactttatggacttagagacccaaactaggccacctttgtgataaattgtggcatgttaaagtaccatgagatagtctggctatttcattgttttccaagcttcattaaaatgaagtgtttggtgttcaactctgggaggtgcttataagtgctattgctgtaattattatcgttcaatgtcacatgacagaaaaatgtttctctttgtgtggtgatttttgtttgtttgttttggtcattatttagtctttgaaaaagcacaaggggaaaatgagtcttttaccaattgaggaaaacccaaattgcagaatgtaatactttgattaggagagtgtagggaatgttgagcataggaaggaaatgggctgaaaagtggtttgcttatttagctggtgtctggcacctgagtgttaaggtggctacaggatagcctttctgagatgtaatttgtgtactataccattgacccatttgaagggcctgtttcagttccttcagagttgtgtgacctgtagatggagttttcctgtgccagcggctgctcccaaatagtcactcagaaacttaatattaattgtaaatgcccagtcaatagctcaggcttgttactagctactgttacatttaaattaacccatatttcttatctatgcttttccacatggcttttctcagaacatcatgtccatcttgcttctctctacatctgctggggactcctgacttgcccttcttcctcccatcattctcagtttggctctcccacgtaaccttatcttgttcagctattggccaatctgcttttttattaaccaatgagagtaatacatattcacagtgtacggaaagattattctacagcagtatcattacagtaacttttagatagaaaccttatccattagcaatcactttcagttttctcccaacccttccagcttacatggtgccttttggtgcctctgtcactagaggtgggaaggtactgcccacacaggccagggctgggcatggctgccgtgagggtatgagaatgctagcagggacattggcagcaggatcctctcataattttagtgtgtgaatccgatactacctgagtgggacctaggaaattagcttcgatggaacttttatatcagtgttccagcacttggttctcttgaaactcgggttttctcacattcataatggcaggaggcacaaatatgtcttttatatttcttagagagcacccttaacttgaggttttctttgtgatgaattcatactgtatcagacagctcttaatagaatcctgtgaagggccacttaacattctttatacatctattacaagtcacttgttttattcctagggtgtacagcctcacttctatatttacatcttagatcatattttagctttgattacaccaatctttgtgaagtaccgtaacaaggattcaaagaatgcatggcatcaaggttaatttctctgggcagtccaatgtgtcagtttagtctgacgctgtgaataattaatatctaaggaaatcctaacctcattcatgattttccaaggtcagaggtggaaatttttcaaattttcaagccagggtcgtatgtatccccaggctggcctcaaacttaccttgtagacaatgatgatcttgaactttagatttcccctgcctctacctccaaaggaggtacagatgtacatcaccatacctggtttcaagattagaatttcttaaatgaaagaaggccaaatttaattaaaagaaaacttgtagcatagttactcagaaattttgtgtagccattaatgattcatttggctttagaaattatatataccaccatgccttctaataaagagttatatataccaccatgccctttaataaagagccatggaagcataaattaaaaaaaaattgtagtggggtggtggtggcatatgcctttaatcccagcatttaggaagcagaggcagatctctctaagtttgaggccagcctggtctacagagtgagttccaggacagccaagactgttacacaaagaaacgctgtcttgaaactgccccacccccaaatcagttgtagtctatctgcaacctcatcatttacattttagatcatttttatattaatataatgttgtgtgtgcgcgtgcgtgcgtgcgtgcgtgcgtgcgtgcgtgcgtgcgtgcgtgtgttatgtccatcaggctagttggcattgagtgcccaagatccacatgtctaacacttccagtgctggggttataggtacacacagccatgcccagctttttatacaggaggtttaaatccacgtcctccagctttcacagcaagtgctcttaccggatgagctatttctccagccccgtttagaccatttagatcccacttactgttttggagcagttttgcttgcctggtttatcttcactacatctgtaaatacagattgtgaagactggatgcatgtcatgtgtctcttagtatcttatgtctgtgctgcaacttggtgtctttacatgggctgtgtaggtaaggcaacagcccaagctgcagactcagaaaacgattttccaagtttgccctcaggtttctttatttgcttggtgtgaagtgtaagactcattcatctcgccacttaccttgttttttgccttttctctgattaaaaataccctgacaaaagcagctccagggaagaatttctgaatccacctgcttccctccaaacactgactggatgaataagccgggcaggacctggctgttgtggtctcccagacactggatactacaaacggtgcccaacgtgagactactacagtcactctggagattgatgctgacctttttgtttacattcttatagctacaattaacgtgaattcggccaatgatggttggtttggcagcttgaaggacagcattcagcagcagcaaggcgaagcagtctgggtctctgaaggaaaggtatgtggtctagatttgctgctgtgaggtgagagtctgtgttcttgatgcttcctccagagggcagtgaatgtagtaaaccatgaacaaataggagtcagcgtgttcttcaagttggaatgtttctaattctccaaaaaagcaataaagtgaagagactttgcaaggcagaacatgatgaatgctggtctacattcacttcccctctacttttaacgtagcaactagaattgcattccaagtactctaatcagagcttacaagttctccatcctaatgccacaccgtactaaggacatgggaaacttggagtggagatgagaggcaaggttgagaaccatggggaaggaatgcagtttaaaatgatactaagtgaagcactaacagctggaattatgtgcttagtaaagagatcggtggagaacgcatcccaactctgagtttgaaagcactaatgatcttttctagccatttcaagttggatagcatccaaatctgtagagatacctgaatacacaggtgtgctgtgggaagaggagagttgagcacctgggatccccttcattctaggagcgtttactccagctaaattgaggtagctggtgatccttatagtgactttttggtggaatggactgtcttgctccctgggacctagatgtttagttggcgaatctagcatctgccaaatgcttgtagtcaccacagctccctggagaggacaagttgaataggatgtcgcatttgtcctcaaggttctgagaatatttttgtcctagtcctggggatttaacccagctactgctgagaaacatctgagagtcttggagatgagtagggacaggggtcagcagaaaagctgcagagaagctgatcccggaagaccagcaaaacagggaagcttggctcagctggcctagaggatgcactgtagcaaggatagatttctgtccttgctaggagggtcttcagtttgtgtccctgtgcacaattaacctagggtcaacatcccaaagtcaagtgatagcgagaaactaaaggttccttccctgctgctagcacatgtcaaggtttccaacagttggctcatcccttgggagttttcttgagtccccactcccaggagccatgccagatcccactcacccttcaaaacaaattcctctagatggaagggatggatgatgaccctgaagaccgcatgtcctacttaactgccatgggcgcggactatctgagttgtgacagccgtctcatcagtgactttgaagataccgacggcgagggaggcgcctacactgacaatgagctggatgagccagctgaggagtccctggtgtcttctatcacccgctcctcagagccggtgcagcacgaggaggtgaggcgaggcacagcacactctgggcagcttgatgcaggctgtgaggccatgagcaggagcagtgttcactgtgggtgctgtagagagtatcttcaaggattggagcagaggatggctagaaaggcccactgggagtcagcgcctacatcgttgtggctgtggtccctggaaagtggagccagaacatggcattggaaaaggttgagtggtacaactcaccactctcttgtcctcaggagtggtgcataaatattggctttatgtgccaactgtccaaattataagtggaactttatgaatatgttattgctatatttgcttgtaacctttgattaggcctctctctgtactcttaggagccctgcttttcttctccccttgacctttaacttcctaatgttattagagttcctgcgtgtttccccatcagtttccttctgtctgtatttcactttttaaatggactttatacatctgctcggacacaccgtgtatccactagcttacacagtcctccaaactgtatcaatgggcactaacttagggtggagggattattcattacacctccaagaacattggaatgatcatctttgtgggcaagattatctaagcacatttgggttatagttgttatggactaccctttagtaggttaactcattccaggaaatgataaatgagatagaaatatccccaaaataaatagcctaacacacacacacacacacacacgcacgcacgcacgcacgcacgcacgtgcacacacacagagtatcaatgtatagtagataagtagtagagagtaaattaatgtctgcagatatagaaagagctaatgcttagaaatactgctggtattgacacagacctttagattttaggaatattttggtttgtttctttctacctttaagggtagagcctgctgccttgtattcagccagtttagtgtgttacgtcctgagctttctctagcaaaggatggttggtatctctgtttgcagtaggaaaggattgccttggctagtcagcatctctgtttccttaagttttcagaaatccagcagagcagagggctgtcttctctctgcttggatgctcttggtgtgaatgaacctttatgttttgtagagtataaggaaacccagcccagagccacgagctcacatgaggagggctgctagcagagatcaacttagggatggtagcccgcccccagcattcaagccagagccgcccaaggtatgtggctgggaaacccagaatgggaaggaggagaacacaggtgccttggagcccatggggcaaccatggggacatacacaatgagacaatgttggacttagcctgtgctcagtgagagcttttccttcaggccattgagtgagcctgaaaatcggggatgtgtgaaagacaagcatgaaagccaccatcaggaaaagtgtatgattataggattcatagagaataagttatttcatatattattatttattcagttatttatgtatttatgtatttctttatttatttttgggtagagaaagtgaaatgtggtcaaaggctgcatgctacaatcaccagtcttctggtgtttttctttttctacccgtttaaagttttctgcccacaatctaatttggatacaccagaggatgctcactggtgatctgctaagaaaacaggcatggctgttgtctagaatgtctctcactataagagcatcttaatgtattgaattaaaaaagcattatctagaacagaataacataagggctccagggtataagtcatgtggtttgttgtcccagaacaccatcagcctataacgaaaggcttttccttatagctcaatacaattttttgtaactcaatcatttagatgagaagaaaatggtgattatgaaaaccatcagcagtaattagtaactttacggaatttgacactgaaggtctgtagtggggctagaattgaatgtgaaggagaatggctgctggcatggtattctgcctacctaccccccccccccacttccgcttgacttcattgtcccacagccaagcacaggcctcactctttggctcagactcctaccctccatgcagcttgatctcagaaaagcctactttttcatttccaaaattgatttcttctgaggtcttttgtgagattccaatcttctctaatatgaaattatgttggtctgttctacctctagctgttactggctaccccacatctgccagcacttctgccatcctcaaggagggctcaagatgcctgaccagtggctgttggctctgtcatatttggttctttgtaaagatggttatattgcccacctttggaaactgatcaggaaacacaatgcattaaatcactaatgtagttctgaaaatgaactaaaagcccaaggtcataaggcataccattgctctttgcaggccagaaaccagaacagagaagaatcctacgactcctccaagtcaaacacctctgccatggctgccagtggaatcccgggggggtctaccagagggtgtcctccccctattgcagtgaaacctgcttccggccgatccatcctgaagccttccactcctgtccttgcgcctgagagcgaggaggtggaggagagcaccgaggagcaggacggtgctcccagatcagtcctgggcagagtgaaaatatttgagcagatggatcacaaggcaaaattacagaggatgcaggagctccaagaagcacagaatgcgagggtaattgttttaaactaccagagtatcttagccttccccctgagagttttcaagatgtgtgctctcagtgtagcagtgcgtacccctttccccactgctaggatcatgccaggcagtcagtcatatgcacagttctgtgcgcctcttccagattgcctgccatcagcatatcctgtttgtttccaatcaaggaagcctcatagagctgggtgtggtggcccatgcctttaatcctagcacttgggaggcagaggcaggcagatctctgtgagtttgaggccaatgtgagtgtaatctacaaagtgagttctgggacagagctatacagagaaaccctgttttagaaaacaaaacaaacaagtagaaagaaagaagggagggagggagggagggagagagggaaggaagaaaggagagagagagagaaagaaagaaaggaaggaaggaaggaaggaaggaaggaaggaaggaaggaaggaaggaagggaaaaacagaagccctaacagtccagatgagcaaacttcagttctctgttcttcagaactgtatgtcctggtttgggacagagagtgagcgtcagtactcctcaaaagttatttaatctggaacatgggaggtggttatgtgaggtccgcaagtctcatacacattcccagatttgccataggatattagcagccattgggcctatgggctgtagtttttgagctgtttaaagttttgaaatgcacatgaaacatttcagtatcaaagaacttgagtgataccagacttgggagtcccactgttgctccagcagcttggaggctggggcaagagaatcactggagcctagagaattggagattagcctgggtgacacagtgagacctgccctcaaaggaggagacagaggcaaggcaggcttttcttcaccccctctccctcttgagaccttgctggtgtcgcgcagggtgacccaggctcagaacatgctccggctttaggctcctgagtagttagttgggctgtaagtcctatgtaacatcaaagtttccgttttggccacttttaagcgggcagctcagtgccataaaaagtacattggcatcactgtgcagccatcaccctgtgggcgcacgctcaggaacttgatcagttccctagtgaaactgcactcagttaacagtggtccccattccctcctgcagccatggtttagggggttcatgtacatggagtcatactgtattggttccttttgtcaaattagtttatttagtgtaatatctcagggctcctccccatgcttcggtcctcaccattggcacatcccatgagacctaccagccatggaaacaggctgccatctattttcctttgtctggaaatgaactgggagaaaaggtggtaggatgtgggggtgggatagggccttcaggtgaccagcgagagaaccacatagtcgtcccctcaccttctgtttcctacctactacagattgaccgctctctccttctgtttcctacccaccacagattgaaattgctcagaagcaccctgacatctatgctgttcctatcaaagccccaaagcctgatgctggtttgcccccgcacatgaggtaagggctgctcagtgcaggtaggccagaggaggaggcttctccagcattgggatttgaagggtttgctctacccagagggcagagcaatggattcccttcccaggctgactgcaccttatcctgtcagtcaaacttaactattaagattgcagagccaaaaggtggacagaggcaggcggatctctgtgaatgccaggacagccagggctatgtagaatcagaagtttctggtcacttgccttgtgtgaccaatgccttctggcacattggagccttacatgttaggagggcacatgagcacagtttttagggcttaggcttctcttgtcactaatgtttacaagcttttagccaagccccttaattcctttgtatcaccatgcacagttgggtcgcttgtgccagactaggtctgaaggactatgctgggcattattgtcatcctgtgaagatctcaaattgagttgtttgctgctcctggaagctagagtcttgttttaaagcactaaaaaactggacgcacgatgattactatttgaatgccaacccacttgaccaagttgaccctgacagacaaaacttggtataattgatttgacactggcagagatctctctaccgagtggggttgtagtggggagcagagtagtgcaacaggtatggtcttcctatgttagttcagacaacatatacctgctcaactaggccttggccttgacctgtaccatatctcttcccctctcagcctgtgaacctgaagaaggaccagcagtgccctggctggtggtagtagaaagtgctcagggctcaggaagtgatcagcctgctgggttcatagcttcagtagcctcgtgggcaaccaggcaatgcaggctttttgtaacaccctcattttcttagctctagacctccagagccacagaaatctccgtccagactctaccacgacacgagctatggcagtgatgcagaggaggaggaataccgccaacagttggcagcgcactcaaagcgtggttactacagccagccttcccggtacagagacacagaattgtagatggctgtgtgtggactcctgggaggccaacctggagatctccagttaaagtgcactgcagagatactgtggggacccaggtgacagacagcacgaattaccaactgaagtctctgtgtgtgggactggggtaaagctgagtatgatttttttttttccactcagaatgaagagaaacactacagtctgacactgttacttgctttggtgtggaccaaaatctgtattaatctctctgtatttttaatatgtatattaaggaacaataactatttttcctcattcatagatgccttccaacactgcttcaacatgaagcaaatgtgaaaaataagtaaaaagaatatatctcaaactaaatccagaagtattttattacaactctctaagtgcctttgagaagctgtgtcttaagttttcttcactgaaccttatgcaaagctataatggactaaaactgtattttgactaaattttttttataccaggtttgcagccgtaactgccctctgcatcatgccatcttttcagggcattgtctttatagtattttccataaattcttactgtacataggacagttacacttggtagtttggttgtcagtgctacatagctcagaggctaagaagttagtctagagtttttattgttgttgttgttgtttgtttaaaaccatgtgctccaccagcagatacttgagaaaagggtattttatttcctttatatcagtgtatgtactgacatcaagcagttttataatttaataaaaaggagtacattataatgagctttgtggtgaatttctacacaccttccttttggggcagtgttgggatggaattcaacgtcctattgagtgtagacggagtataccctgatcttcttgatttattttaactaaaatcttttaaaagatcgtgtgtgaatgtttttcctgtatgcactacctgtgtacctggtacctacagaggccaaagagggcaacagatccttctagaactaaattaggggtggttgtgagccactacagggatgctgggattcaaacctgggttctttgccagaacaagtggtctaaaccactgagccaactgtctagtccctctgtcctgtgttgaagacctttacttcagttgatcacaccagtgagaacttgttcattcttgaaagctggggaatagagacacatgaagaataaagtaagttaccccatcacagccctgatcatttttgggtgtttcctcctgtaattcatacttgtctgtttcctgtttgttgctggctgtgcacttctgtcccctattctttcttcttcatattacatcaagaatggtcccctcactccacatgtccattgtgactgactgcagactaatcttgcccatgctttctaagagaacactctcctgctggctgtttccatcatgtccatttctccctctattacattagatgttatctaagccatactttgtgagccagccatcatccacgagctctctcctgagggtagatgctcagaagcgctattagcaagaggaagcagtggggtatttctagggcttatgtttactactaaattgcttcctagaaaagcctatctgttttcacattcactcttgaaagaataacataggtgtaaaatagaaatgctgcagggtaggaacctaagctcgtatgaatcaaaggtgcacagaatttgggagaagaagactgaagaggacgggctcagttaagtgtcctttatgttgtgatagacttgtcaatggtaagctttagttttgatggagttagaactggggcttagtgaattatgctctaaacatgtcctttttttgtgctgtgactccaagccattgattgtttcagcttgattttctgagcagccctcaagttctcagcaggcactgactaaaaggcactctttctattaataaaagccactgtctgtgaacagacggaaatgtatactgcttaaatccgggatgacttactgtcccttcctcctttaaatacaggaacaagaagccatctgggaaacccatttagaggaggtaggaggcttccctgtaggcgctggcacaggctagcatcagatgcattaagtgatgaagacaggcagtgtgtctggtccctggaatggccatcggtgcccagtgaccaccagtcctattcatatacaccacttcctattcatatcctgctttgttctggggaggacacaaagctccctacagtttgttggagttgtgaaaacagtggtgctaggcaggtgaagaaaggggaggagtacgtgagacagactggggaagtgaactttgagtgagggtggtgttcactctgctgtagctctatgggtctcgggcagaggggtgggtgaggaattttctccattgtttttattctgtgagttcccaaatggccacaaggataggagagacccccccacttccttttttttttttgttgttgccattttgtcctttgagattgatctcaccatgcagtccaagctgttctaaaatgtcatacctcctgcctcagcctcctgagtgttcggattctaggtgtgtaccaaccactgtggctggcttgggtggtctgtttcttactatgttcttttatggggggcagtagcacaattctaaaagacctctcagaatttcttggagaagggaccggcaatgtgtgaagcagcactcttatagtctggctctatcctgagatctctgtcctgactttgcatctgtctgggatgcatggctgggaaggaagatctctactggataaatgatcctaggagataggggttgcactctgagaacagatgtctgagaacagaggagatgagagtggagaagagagtaattgtattctggaagaaagtcggtgagagctggctctggcaggcaattcctataaccctttcttaatttatgtcaagctgttctttcctgctttaattgcctgctgtctgtatccctgccattctaaacacttccattagagaccacaagaagggcagaagggagggctttgctaaaggatctgtgggaaacacttacacattgctcacccccattagcagcttgggaaataggaattactgcaagttggtttggtgggttttaaatgggagatactggttcagaatgctttccagtgggcagccagtgtctttgagtccaagtcaagtgtgtgattctctgattaaatcaacctaagggtgtttaaaaatagcagtgacctgggtatagtggttgtggtggttagcgttgtcagtttgacagaatctgctgggtgtgttcctgtgggggctgatggagagatgagcttctgggagttcttgtgggggctgtattttaattttgtagggatatctgcccactgtgggtggtaccattacctggatgggatcctggactttatggagaaggccagatgagagctcacaagatttctgtttcctggttgtgggtgtccagaggtcatggaaggagaatgggagtttgaatataatcaaaatatgttgtatacacacatgaaactggcaagaataaagaagttttaaaaacaaagcaaaataaaaacagaatgttgagtcagaacgtggaagtcacaaatccagtctgaccccaagttcacactacggtggtgtgaataagaatcgaacccataggcttaggtttgcatgtttagtcaccaggaagtggtactgataggaagtgtggccttgttggaggaagcgtgtcattgggggtgggctctgaggtttcaaaagcccaacccaggtccagtggctcttcccgtttcctgaggattcagatgtagacttctcaatgacttttccagcaccatgtcttcctgcatatggccatgctccctaccataatgaaaatggactaaactccaaatctgtaagcaagccccagtcaaatgctctcctttataagagttgctgtggccatggtgtctcgtcacagcaatagaacgctaagacagatcccaagtttcttctcttcttgtgatccctggcctgcagaggctgctcaagaggctatggatcagattctcaagtcaaagggatttatagccagacccctggtgtgtcagttgcggtttgagcgagttaccctaatgtttgagccttgcttttctcatttatgaaattggggaagaaactatataacaccgtggcatgagtctttatggccatgccattgccctcactcaccaccccttcttgcatctgtggcctttgtcacacctcattagtttcaggaaaagggtcagaataagttccccaatccttagctttggatttttttttttttttttttttttttttttttggctgttaccttcttttactatcacaaatagctgaggaaaaagagaaaggaagaaagaaaagaaagatgtttgagcccatagttttgaaggtttcattctatgaccaggagactctgttgctctcaggccagtggtaaagcctcacgtcatgcagggaacacaaaggcagaacaatgcttctgtcctcaagttcagggaacaagagtgaggtggggcctgagttgcatagtctcctttgaggtcatgattcttgtaatatgaagacatcccatcaggacccgcctcttaaaggagccaccaattcccaacagtaccaccctggagatcaaaccccttaacatttgagccttaagggaacttcaaagtccaaactatggcaccctatgacttactctcttgtccctctgttgtcagcccatgaatggaactgtctcagctgatgaaattacggaagagacaggtgaagcaaaactagtccagctgtcttgattgagatcagcccacctgtgtgtatggagaacaatttaagccactgagttccggggcattaggcaacaatagcccacgagattccccagatccttattcctacaaaacttgcttgtgttccagatgcaggagaatgcttgagcccaatacactcctggttttctgattttctatcttctgggaaaatcttctttgccatttttaaaagcccctgtgatggctaatctccttcatcaacttgacacacttgggaagagagaagctcaattaaagaattgcctctgcgcatggtcttgattagtgagtcatgtgggagggtccagcctgctgtgggcagtaccacttctgggcaggttgtccgggtttgtataacaaagctggctgaacaggcacaaaggaagcagaagttccttcatgatgtctgccttagctcctgcttccaggttcctgccttgatctcctgccctggaatcctgcagtgatggactgtgacaggtaagctgaaataaaccctttcctctccacgttgtttttggtcagtgcgtttgtcacagcaatagaaagcaaagtaggacatcactatttacccttccaggttcagctagtgcacgtgctagcacagcttctctgatttctccagtcagactgaccatcagctccttcagttcactatgaagagaaccgtgagatgttaagatagtagaaagaacatcaaaggaactaagtagtataagtcatttagttaggaatattggcgtttgggtgtggaagagatagctcaacagttgctgttttttgtggaggacccaggttccattcccagcacccacgtggcagctcacaaacacccataactgcagttctaggggatctgtctgagctcttctgacctcagtcagcatcaggcactcttgagttagtgcacatacatctgtgtaagcaaaacactgacacacaagttaaatcgagagagagacagagagagagagagagagagaggagagagagagagaaaaaaacattggcatacaaattctgagttacatacaacattgcttaatgtcctgcagaaattctttgtgtctttcagacaaaaatctgcacatcagtgtttaagtctaggaacttggatcaatagttacagcatcagtcaatcattatgtgagtcattatactgaataatctcacagacaatctgtggctcattaaaaaaaatcaattctttgcatttggattatggcaggaagtaatgctaattaaaaatatttgctgcatgtctctgtagatggacccagacactgtgaactgactatgatttattctctgcttttgagaagttcacaatatagatgctcttgtgcctgattcttagagtttgatatttcctgagctgaaaattgctttgtttttagagcagccctgcatagtaggagtcaaagcaatttccggcttgtgaatccaatttcctctctccctatctagaggccttttctggaaggtttcttgagatagtttgctgaacctattgttatggtttcctttaaaaattgtaaagcatcaatgtgctttcaagaacctagtttacaatatggcaaaatattttttaacagccatggaacaaatctagttcatgaacatgaatttcttggcctacatggaacaatgaagtttataatgaagggctggtgagatgtctcaatgggtaacaatacctgttgccgaatctgatcataagttctattcctgggtcctacttggtggaagaatagagaaccagctctcacaaattgtcctctgacctccacatatgcacgatagttcacatgcatgctcacgtatatacacaaaataaaaacaaaaaaatttttaaagatttattttgattttaagcatatgggtgttttgcctacacaagtctgtgtagcacaggcacacagtgtctgaagagactagaagaggacgtcaaacctttgaaatgagttacagatagtgagccaacgtgtgggttctgggaatcgaaccctggttctctgaaagagcaacaagtactcttaaccacagaaccatcttcagcccttacaaaacgtttttactggaaaattcgatttaagataatagcccagacttctttttcttttaaaagtggtagattgggtagtgctgggcatgtgtctattcacagtaagatcaggatggagctgagtgggtaccgttttaaaccagggccctgcctagcctcctttacaaagcatgaacagatgaagccaggcttggccaaacttgttcacctcttcctgcttcccaccctggctctgcatggcttgtctggcttgccgttccctatttcagatgtgctattctgggttgtggtaattattcagcctgtgagcatgctcttcagtgacaactgagatacctcagactaagaataggagtctgactgatggaggaaggtgacaagcacaggctgggagagactctgctctctgccagggcttctgtaaaagaactgagactctgatgtcttctctgctgatgagctggctgtgctttttctattctctctctctctctgtgtgtgtgtgtgtgtgtgtgtgtgtgtgtgtgtgagagagagagagagagagagagagagagagagaacactcttgttagctgtgtaatcatcaagatactgtcccaggcaggaagtttctcagggtcctaagaagtctccccaacagctttagctgggtcccctgggctaagtgttaccagacgttgctcagtgatacacttggggctcttgccttggccgaggcattctttgaagccaaatgggtaactttttgcattttctttttttttccgatatttatttatttatttatttatttatttattatgtatacaacattctgcttccatgtatatctgcacaccagaagggggcaccagatcccattatagatggttgtgagccaccatgtggttgctgggaattgaactcaggacctctggaagagtagccagtgctcttaacccctgagccatctctccagcccctttttgcattttctaagggtttgtaagagaaatcagtgaaactctatcccttttcatgcataaaatggcaaaagatttgagggtagaggttggacacatcctggtggccatgctttgtggcctgggccatttaaaattttcaggcctctgatgtcttgtgtatctagcacagaggttgctgaggacaaagctcagtggcagagcctagcatgcgtaagagcctgggttcagcatccagcacagcaaaagaaaaagggagtttactaaagctcggctcttgatgtaatgatagactgagtttggaacgtatacagcacaataaatacttgacagacatcagcccttgtttttctcaaaaagtcccacggagtcaagttccaagaccctgagtagtgacagaaagtatacattgactttggagtttcctccttctggacctccttcctgagtcacttcaaccagcgatcatcttgcatacaggccattgtgttggcctctgccttggggaaccctggatacgtacgatagcttcaaatgaatagccccaggagtgtggcctcaagctgattagaatcttgctttcatgatatgagacatccgatgcctctgtgagattgtgatgccaatataatttacccactgtgtttactaaagttctagaggacaggtaggcatttggggaaaggaggagaagaatcagatgcccagggcctttgtcccatatggtctttattaagtgggtgtaaaattgctcttctctcagggtgatccaagcactgaatgcagaagcaggggctccacccatttaggtcaaacaagggggaagtctttaaccttgatattatttagtctaaccttgaagtaagctaagggttaacctggatggcctagcatatgggatacatggaagataaagagaaatagtgaccaactgtgtctactgtttaccttctggttattttaactatggtccaggaaggagaaaacaacagtactcactgctgtcagtttaccgagtccctgtcactggttcattcttaacttggcagttcctgcagctatggatctgtatcatttgctaaaaagttcttgctagcttgttttcaatgtagcgtagaagaccagtgtgtgaaaatgacttataagcattttggggatttttttttcatgataatgtttaaaattcacctcctttagaaattgttaatttctgccaggctgtcatggtgcatgcctttcttcccagcactcacggcgggtggggatcacagaggcaggtggatctctgtgagtttgaggccatcctggtctatagagcgagttccagtacagccagggttattcaaagaagccctgtctcgaaaaacaaacaacaaacaaaattgttaatttcctataagggcattactgatccctgatcatctatttgaagggcaatgacatatcagtatccatgcatctcaaatggtgcctggcagaagatggttactgggtaacatcctagtagtgccccccccaccaggttctctgccaaggttggattgggaaacttgagttcttgaacatccaagagaggagccaggggaatgctctcttattttgtgatatgatgtgctggttagctttaactgtttacttttcacaacctagaatcacctgagaagggagcctcagttgagaaattgtctatatcagattggcctgtaaggcacatctgtgtcttgattgctaattgctttaggaaagcccagctcactgtaggtggcaccattcctaggcaggtgtacctgaagagtataagaaagctagctgagtataagccagtctgcaagccagttagcaagcatcctcctccatggttcctgttgtatttggtcacaggtaagactatgtggagtagcatcaagtttctgtgtgagttcctgttgttacttcccttgacctggaattttaagccaaataggccctgcccttcccaaagctatttatttctttattatgacagcagtagaaatcaaactataacagctgctcttacaatggctatatatacatgattatttccacagaaatatccacaaatcctcaaccaagttcaagaagagaaatattcaaacgtgactctcgctgggaagactgtaggtcagaaatattgccataatcatttgtgggaaatcctgtctgccacatttacattcaggtccccaacgagatattgccacctccattatcttttgaaatagacaatggtgatggttgggaaggaaaaatggctggctctgctgcagtaaacacagacaaatgtttggggtgggggcggagagagagatcgagtaaaaagccaacggaagaatcttagattaaaaaataaacatgtgccaggtggcggggacacacacctttaatcccagcacttggaaagcagaggcagacagatctctaggccagcctggtctacaaagctacaaagagaaaccctgtctcgaaaaaccaaacaacagaaaaacaaaacaaatgtacaaaaaaacaaaacaaaaaaacaaaaacaaacccacataaccacagatgaatcaaacaaataaaggtcactcaagacatatgttgctcatattatgtctgtttggtattggatctatgttgcctaggttggccttgaactcctagactcaagtaatcttgactcagtctcccaagaatctggaactataggcatgcactgtcacatctacctttgagttctcacttttaatttgtgaatcatttgacaaacttgaagaatacagccctgtgagtgatccaatccattctgcctccatccaagttatgtttcaaaaacctcacatatccagtcttagcaacgtgtgtggacaagagccttgcagatggggctgggtgttgacaaatatctgagaatgaacaaaggttgtacctcttgcttgactagtaggcatgcattcctaaagtcccgaatgagagcttgtgctgtccacatacagacatcccaggagcagcacaaaaactgtacaccgctgtggaccctggagacttgcagtcagtcattggcccaactgttgactcaaatgtggacctgtacatatttattgagtgattagtgagcacctggtgtcataaaggcataagattgtattgtgctgaccccataattcaggcagtccatgaaaattatatgagaaaatgctaagaaaaagaaactgcccagaaacaagaagggttggggacaggcaatatacagataaagtagccaagggtgcaatggaggttttggctcctgtgttattctgaaatgcttgtcttccttttcacaaagacctcacacattcagagccccaaagcagagtgactggctatagagaagctgcctcaattccaaaccttacagatcctattactctttcttcagcatgcacgtcttcctcctgctgccacaagcccaagaggttggaggcatagaatggctcagctggggaggagtccctggttgctcaagacttggcactgtttggggcacattcccacttcttccaagtatccccttaggcaggtgtcatccttggctcagatctccttgttcatatccactctttcctgcccaaaccttaactgaatggccttcccaccctgcaggtgcagctttcctggcaaagtagcatctcagactccagtgcttggcagggaaagaggagaaagcatgggaaaacctcaggctcaggacatcccaaggagtaggactgagtccaccagtgcggtactcacggaaaactttggtcaagtaaccagatcttgtcactgtctctacagccaacaagagcaatgtattcagcatcctggacaactctctgcttcctcttgcttcctgtagaagtccccagtggccaactctctcctttaatgtaactagtccttcagggctcagccagtcccctggtgctgttctctcttgcttcaatgttacctgtcactgggttagtaagcctttggatgccatataccagagaaatgacttaaaaggcagaaggatttattccagctcgtggtttcagatcacggtcaattggctctattgtttctgggcccagagtgaggaggtcattatggctttgaggattgaggagaaaagagccccttatcccatggtatccagaaagtgggagacaggagggagggatcagaaacaaagcagaaaagagataccttaagcgagggggctattgtggttttaaagagaaatctggcactagggaaatgtccaaaaatccataaggattttatttatctaagcaataggggaggggctgccttaaatgctcttccgctataatgagactgatgactgccttaaatgccatcctagggccttcatctagtagctgatggaagcagaagcagagatccacagctaagcactgagctgaactcctgggatccagtaatagagagggaggagtgacgaacaaaggggtcaagaccattctggggaaacccacagaaacagctgacctaagcaagtcagctggggaaccagcatagggctgaaccagggccctgagcttgggtgtcagctgggggacttgggcagtctatagagcctcttgcagtggaaccagtatttattcctagtgcatgaatgactttgggagcccattcccccatggagggatactctctcagcctaaatacacaggggagggccgaggccctgccccaaatgatgtgacagactttgatgatcctccatgaaaggcctcactctccctggggagtggataggggtggggggtggaggcatgggaggatgggaaggagggagaaatggaattaacatgtaaaataagattgtttctaattttaaattttaaaaagttaaaaaaagaaaatgaaaacagaaacttaatagatactgtatactcatatatatatatagcagcatgactcccaatagccaaatggtggaaaccacccaagctcttatccatttgtgagtggttaaggaaaaagcatacacaatcagttgaagtgtggtgctctgaaagaaaatgatctctccaagggattgtctctattaggaggtgtggctttgttggagcaggtttggcctcgttggaggaagtgtgtcattgtgggggtgggctttggggtcccaagctatgctagggtcacagttattcttcttttgcctttggatcaggatgtagagctctcagctccttctccagcagcatgtctgcctggatgccaccatgtcccaccacgatgataatggactaaactctgaaatgacgctaacaaccagaagcagaattgcttagctcagtgcatgctgcagtttgcattccaatcagtgatgcacattgattccaacttgtccacatccttgccaataattattttcaatgttgtttttataacagttttctatttacatattgaatgttctccaaagacctgtatactacagtcttggcacccagaatcattctgtcagaatgtggtgcatctcttagtaggtaagatctaatgggtggcctatgggtcaccgagggtattattgcaaagaggattttggaaccctggccccttcccattcctccctgaatctgccatgtattcttgtcttaccatgctgccattctgtgggctcaagggagcaaaagccaaccaatcagggtctggagcctcccaacccgtgaactgactgaagtaaatcatttctactaatgattattattatcttggtgttttgttagatcatcagaaaacctaactaacacaatgaccatggtaatatgttgttgtttttttcttactctttactctttgggggtaggggcaccacccagctcccaaataaatacatcagagagtattattatttataaatgcccccccccccaaaagcagaatcttcaaaggtacacccatagttacctcctttcactggaaggccccatctcctacagtttctaccagcttgctaaattagtgaaaccagctggacaaagctttcaaggtgagcttatagagggcagaagtcaccacctccaggaagtcttccaaggtctgtaacagttcctctccctagcaaataccactgcattgtccaaaatgttatcccttgtgcctctctagactccaaactctgtgacacagtgactgtcttaacttcagcactgggcctatgtgctggagtcaaaacagaaagagaggggatagttctctttcttcctcctttggctttctgcagcatggaagaatgatgagaaacaggcggggatctagaaggaaaggcaccgggaagtattttgtttcttgtactttcactatggttggggctattgtgttgttggggatggagttaaaacagaggcaatcttcagtgcttttgctggttctgagaacatctgtaaatggcagccagccactctgctctccccctgtcagctacatcaggaatcaactgagatgctacggtctggtttccttacctccatggtcaatgctgaggttcctgtgtgtgccctttaaaagaaaatacttaatggctgttttgccttgccttagagaatttgatttctattactatcccagcattccatccctagagttaaaagctattctcttaaaattcctgtaggaaaacaaagcagcattttacctttgtttggtctgttctctgagccaagctctcaaactcatttagcttttgttccttgtctttgctgccctgcccagttggtgttagctttgacatatctggtaacctgatgatgttgcctttttaaatgtcatacctatataacccccccttctatcatctcagcagttattttatcagtaaagataagattattgtagtggtttgattaggaatggccccaatagactcattcttggtccatagggagtctattaggaagtgtggccttgttggagtaaatgtagcttctttggaggaagtgtgtcaccgtggaggtgagaggaggaggtctcatatgctcaagccaccaccagtgtgacagttcacttcctgttgcctgaggatcaggatgtagcactctcagctttttctccagcaccatgtctgcctgcatgctgcaatatcccatcttgatgataatggactaagcctctgagactgtaagcgagctccaattaaatgttttccttcataagagttgctgtggtctcttcacagcaataaaaccccaactaagacaattatgttgctcatttcacattcaaagtaccagcaatttaaatagaattttcttcttgcataaaagaagttgggagttggttgatatggtggatccatatacatcttaaagggagctttctcactctataactttggcttctttttttaaatttttgcttatttatttatttggttttttgaggcagggtctcactatgtggctttggctgtcctggaactcactctatagaccaggctgccctggaactcacagagatccacctgcttctgcttcccaatttctgggattaaaggtgtgtgccaccaatgcctgccagtttccatttttaaaaaaatttattttcttgtttatgcatatagatattttgcttgtatttttatctctgcagcatgtgtgttcctggaacccagaggccagaagagggtgttgggtccctcggaactggagttacagatggctgtcagccttcatgagggtgctaggaatcaacctcaggacttctggaagaaaagccagtgttcttaaccactaagccatctctccagcccctcaagttccaattttaaggagtaagaaggaagtggctgaattagaatacaccaggatgtgctcaagcagtggttctcactcttcctaatgctgcgaccctttaatgcaggtcctcatgttgtggtgaccccagtcataaaattatttttgttactttataactgtaattttactactattatgagttgtaaatatttttagagctagagatttgtcaacggggtttacttacaggttgagaaccattgttctacagtaatgaccagcccccagatttctagctaacaataggaattgcttcggtctctcacacagctcatcctttaattgctgtgttttcctcatctttctacaactcagggtgatggagtcatttctcttgaggacagtgtataccataccaccatagtagagagacaaagaagcaaaaaataccttctaaatattttaaattattattttttgggtagcatataaatgatgggttttatttttaaaagtgtgtgtcagcaaactttgctcatcctcatcttcccattgtcctctgtccttctttctcttcccatgatcctcttctcccctaaacagcccccttctgtttttgtttacaaatgtttcaatccagattccacatatgagaagaaacatctgatctttttctgtctgacttaacacgatgctctccagttccatctacttccctgttaagagacataattttcttttttatagatggatgtaatttcatcacacatactctcagacagcccctccatgtatgccacattattttttaaatccacctgtctgttgatggggacctaggctgattgtagtgatttatcatttatgatttattaaagcttgactgaggaatcagaaagcaaagtcagccacaagctatagaagccaggcacacacctttagtcccagcagccagaagctaggaggtggtggtacacttctttcatcctaggactctggattaagaggtagacagacttctataagtccaaggccacccaaatctacacaaaagtgaatcagtctaaaagagaattacagctcacacctttaatcctaacattagggaagtaaataaaacagaagcaagctctcagagaggcattcattctccagccttgatgaagagaggttacagtctgagacttgatgagagctcatggggacaggatcagcccattcagcttgaggtagaggtaagaagctagaggccagctgctttgcttttctgatcttcagcttgaagcttgaaccccaagatcagtctctgggtcatttatttattggagttacagctaattgcatctctttgctattgacagagtagcctttaaatgctcagtgccaccaaaaataatcttaaatctgacatttcactggcaatatttatgattttttttgttgttgtttcaaccactttctgcttcctttactgtttgtcttttgtctgagctccttgttaccttttgtttccaagttcttggttttgtttgttggatgccttcctcaaatgtatgatagtcagcagtgatatacttgtttttgagagtgagtaccaatggaggaagtggtagaagccatatataatagcaaaggtacaccgaggacagcaacatgggaacaaaacaacacggagcaaaacaaaaggaggaccgacatcattagttttctgtactcttttctggaaatagacgtagtcagctatgagcccaacccaggacagtcgaagcaagaaaatatgttttatataaatgatgtcataattttatatcccactcaacaatcaaagagtgagagcaataatgatattattcaggcagacacacaccaagtttatccaggcatgctggcacatgctctaacttctaaacttgggagactaaggaaggaggatttcaagtttcagctatctgacttatatatagtaactgtctcaaacaaaccaacagggttaggccaatgtctcagcacataaatcacttctgtgcaaccagcaagcgtgagggccagagttcaaatcatcaaaacccacataaacatcagatgggaatgtgactccagaagtcagaggcagggagatccctacagcaagttggctgcctacactagctttattggtgagctctgggttcaatggattgatgctgcctcaatggataagttggacagcaattgaggaagacttttgatgtccacttctgcttctcacaaataagacaaaaagtaccctaagtttgatactgccagattttaaccaaaagaattattataagatgttgaagtttatgctgcagagagtgtggaaaagggggaacactcctccactgctggtgggagtgccaactcgtacagccactttggaaatcagtatggcgactcctcaagaaaatgggaatcagtctaccacaagatccagcaattccactcttaggcatgtgcccaaaagatgcacattcatacaactagtatatctgttcaactatgttcatagcagcattatttgtaatagccagaacctcgaagcaacctagatgcccctcaactgaagaatggatggataaaatgtggtacatttacacaatggagtactactcagcagaaaacaacaatggaatcttgaaattcataggcaaatggatagaactagaagaaaccatcctgagtgaggtaacccaatcacaaaaggacaaacctggtatgtactcactcatatatggattttagacagagagcaaaggattaccagtttacaatccacaccgccagagaagcgaggaaacaaggaggaccctaagagagactgacatacatggtgacccagagatgaggaaagggacaagatcttctgaacaaattgggagcatgggggagagaagagggagctatgaaaaagagaagaggagaagaggaggggagaggaggacatgagggagcaggaacattgagttggggaagaatagaggagagcaagataagagatatcataatagagggcaccattatagttttaaagagaattctggcactagggaaatatccagcgatctacaaggatgaccccaactaacaatctaagcaatagtggagaggctaccttaaatgcccttccccaataataagattgatgaccaccttatatgctatcctagagccttcatccagtatctgatggaagcagaagcagacacccacagctaaacactgagctgaactcctggaatccagttgcagagaaggaggagtgatgagcaaaggggtcaaggccaggctggtgaaacccacagaaaaagggggagctcatggaccccagactgatagttgggaaaccatcataggactgatctggaccccctgaatgcgggtgtcagtgaagaggccgtgaaaatctatgggtagtggatcagtatttatccctagcatacgaatggactttgggagcccattccacatagagggatacgctctcagcctagacacactggggagggcctaggccctgctccaaatgatatgacagactttaaagatcccccatggaaggcctcaccctctctggggagcagaaaggggatgggataaggggtaagttgggggcaggggagaaggggagggagaggggactgggattgacatgtaaaacaagtttgtttctaatttaaataaaataataaaaagaacaaaaagatgtgtcttattgaaagtaaaattaatctaaaaatggcagacaagataaaaactatgaacacagacatggagacatgtcataaaatatactacccatctgctataaaaattggggggcattttatctcttctctaaggcagctttagtgaggtataatttacatatcataaaactcagtccagctctcggaatttcaggaaactggatgagattcacagcccttctaggtttgaagtgctcccatcacctactcccgtctcatcactgtctgcagtgatcctggcacccattctgggccacagataagcatcagtctgcttgctgtttttgtcattttttccttttctagaaacttcatgcaaatggagttggacaataggcagtctttcctgttaggcttccctcactggccataatatttttaaggtgcctgtgtgatgttgcattaaacagatatttttagtgtaggatttaaattcctgtgctgaatttgaacagctttattgggaaataactaccgttgcacagggttcatccacttaaagtatattttattcattttgtggctcaatcattaaaaaaaaatccattcatcggttggtggacatttggactgttctcacattttaactgctctcaataaggattctctgagcatctccgtgtggatatgggatttcacttctctccggtttgcacttggggaaggcttactttcgtcaatgtgctctgtgtacttcatcaaaggatgagtgccgggactatagggttgggtgtgaccacaccctaggtggtgctactttttttaaaattatacccagcctagtgggtatgaagtggtacccagtgtggttttgacttatatattcctagtgacaataatgatgaatctttcctcaggcttgtcagccatttgtgtatgtttggagaattgtctattcaggtatttttctcattttaaaacagaatttctagttataattgagttgtaacaaatctttttttattctccattgccttttcttgtccttccttcctcaatggtcaccctcttctttccaaatagtgcctgtcgtgtcttttttttaaatctctaaattccagaagtgagatgaactatgggttattttctttctgagtctagtttgttttgattaacttgatgatagctagttcttttcatttttttttctgaaaaatcacataatttcattctttttcatagctgaataatatttcattatatatgtgttatgtatgtggtcttttccttatccattatctgtcaactgatatctaagctattccattacttggttactatgaagggtgccatgataaataggggtgcactgatcctctatggcatgctgacttcagttcctttacatacacacccagcaatgatatagtggaaccatatagcatagggtagttctaaacacagttttgagatttcatactgatcctcatagtcaacactctaatttacaccctgccaatggtgtttaagagtttctttctttttctttcttgctggtatttttttttaaacgtctgtttttttttttttaaagatttttatttatttattatgtataaagtgttttgcctgcatgccagcagagggcaccagatctcattcaaggtggttttgagtcaccatatggttgccgggaattgaactcaggacctctggaagaacagtcagtgctcttaaccgctgagccatctctccagccctcttgctggcatttttgctgttttcttaagggtaactattctccttgaggtgagatagaatcgtaatgtagtattgatgcacatttctctgatagctaaagatatatatatatatatatatatatatatatatatatatatatatgtgtatacatataaaaatgcattttttccaggtgatcaggccctttaaaaatgcaaccactctggggctggagagatgggtcagaggttaagagcacggactgcttttccagaggtccttagttcaattcctagcaaccacatggtggttcccaaccatccattacgagatctggtgccctcttctggtgtgcagatatacatggaagcagaatgtataatacataataaataaataaaatcttaaaaaaatgcaaccactcacactggggagaagctgggataggagatctgacagcaatatagctaaagatgctgaatcttttaccaatatttattgtaaatttgcattgttgttttgtaaaccatatattcagtttatttgcccattgatagagaggtttattctttgggtcttcaatgttttgaaaccaattatgctagtttgctttctgttgctatgataaatcatggatcaaaactaacttggagaggaaagggtttattttatcttacaactcccaggttgcagtccatgattgaaggaagccaaggcaagaattcaaagcaggaagctggatgcaggaacggaagcagaggaacactgcctaatgacttgctatcctggcttgctcagcttgctttcttagacaacccaggaccacttgcccagggatggcagtgcttgtagtgggcagtccctcctacatcaatcctttatcaagaaaatgcccttgtagatatgccgataggccagtctgatgggggcaattcctcagctgagattccctcttcataggtgactctagttggtgtcaagttgggcaaaaaacaaccagaatatatatattctgcatatatatttattaggcgaatagctgtcaaagattttctttcattccatgagctgcctgatcattcaggttgctagaaaactgttcaaactctcacgctagcaaaaccctgtcctgcacagcgtgggcatcttctcatttggtcttcctagtaggtaccaaatgtgctgcacaaggttcagtaggcagcttcagggctcagtcctccatgactgccaatactcaaagccaagagtcaaaggagctgcacatttaactggctggtggcaacttggggtttcccaaaacaccccacttggggaccattaatttgattagagaaacacagaccttaccttatacacttactgtaaagctaatgatgaataagtaggttgaagattcgcatgaggcaaagtatgtgcagagatgtgaagagtgcccctactgggacttccatgtgttctgaacaccactcatgcagggatgctcttgttggctccaggttgttggcacaattgcaagccagctctgtcctccatctgcccctcttcctagaggactgagagctccttctcacactttctggtgtacagcctgtatctaggagttcaccaagacccactgcatcaagacaaaagatgctcctgtcccccaggatgccaccaataggttaggggctcagtgctgggtgatggggcaaggatgtacattcatcacattatctcaccagtaaaattcattattcctcttgaaaccaaaccaagttaaaaagacatgagttgtgtttagaatctacaaagctaggaaaggaacaagagtagcctaaatgacatgaaataagaaagaaaatatattttttaaaaatcaggaaaaaagatctctgtgagttcgaggccagcctggtctccagattgagtgccaggataggctccaaagctacacagagaaaccctgtctcgaaaaaccaaaaaaccaaaaaaaaaaaaaaaaatcaggaaaaaagatgaacagaggtcaatattatttatttataatttcatttttaattttttgaggcatggtttctctgtacagccttggctgttgtggaatttgctctgtagaccaggttggcctcaaactcacagagatctacctgcctcttcctcctgagtactaggattaaaggcatgtgccaccactccctggctttagtatactatatttttttttaaagaaaaagaaacaacattattgcctgactgatcaagaaaaaaggacagtaaaaaacacaaaaatgaaatattagggtcaatgcagtaaaaaaaaatacaattgagatagttttattattatcatcctgggaattaaacccagcatcttacacatgcaaggcaagctctaccattgaactgtattcccagcccagcaattaagtttttaaaataagggaatctggggttggagagatgattcagcagttaggagtatatattgctcttccagaggatccaaattcaactataactccagctgtaggggatccaacaccctctttggcctctgtgggtgtgtggcatacattcacacacacaaagacacatgaataataaatctttttaaagcttaaaaatgaggaatcttgtagatagttccatgccagtatacttaccaacttcaatatagtcaagacttctatttcccccaaatccattcttttcatttttctccatggtggttggcatggctgcttgaataaagaaggcactatcaggggcttggtagttaagagcaccggctgctcttccagatgatctgggttccattcttggcactcacatggtagtctacataacaagtctttatctccagtcccagggatctgacgccctcttctgccctctgcaggcattgcacacacatggtgcatggatatacatgcaggcaaaacacccataacacataaataaactgaacgaaaaaagtcttaggaaagcatatctttcacatggcactgcttccatgactatgctgtaaccagctggcacctactctgcttctcccttcttcctttcttcaatcagatagatggaatatggatatgatgtctgcatctgaagcagctgtctgtctgtttgtctgtctcgattaggttgtgaggtgggagtcatgcatggagcagcaagaaaacatggaattacattcctgacatcttttgaatccatctagtaatcctgtataggctacatccagatgtagtttgcatgccagagaaacaaattgagagctttttagggcaatgctattttgggtttcctcaagggagtactcagtgattgcttacacgttgtttagccatacttctgacattcacattaagaaatttcttggcgtatgatgggcaattcttttgcaggcatctaagttacaaactagtgttatttaatcctttcttggacagttctaccagaacacttgtatctaaataaagccattttcccaacagttaaaattgctttcactaacgttttctactcaaccaatctgttcttagcaccctttgagataccccaataacttctttccatagctaagtatggagtaatctctttgaggagtccctcaacatacacatccatgcacacaactcaaccaaaatggtaattatgaacacacatgaccaagttcggtttgtgaaggcagcaacagctatgtcatgaccgctgttgaagatcaaagtgtgcagcatcagagactgttagatacccaatttcacaggtaaagaagtgctaaggttcaatacagataaagcattcaaactactaactacagttaggggataatttgtgatatgaatagggccaagtgatgaactcatttataaacaccaactggaaaatgccctcatctctaaaattctaccaattccttagtaagcagctgatagacccctgtgtgagatcactgcatgacttcatattgtctgtatttatgacagaaggagaatctgagccacttgcctttaatatcatgtcagcctgtcccttctgtaaatagccacctaggctgggaaaactcaaagtcacccagactgtggccagacacggaagacaagagagctcagagaaaccacagtggctgaggtttcaggctggggattatgaacacttacagcaaggattcagccatctgaaaagatgtgccttcagtgatggatcagaacctttccagaaaggacaggcttccttccccttgttcaatgtcactgtctgtcttctctagagcactaggaatttcaggatgtcaatggagtcatctgctatctacacttttttaattttaattttttgcatgcaagtgtgtggatgtatgtagacaatgaccttgggtgcctctctcaatttctctccactgtattttttgagagagggtttctcaatgggcttagagtcaccaatttgtctgggctagctggccagtgagtttcagggatcctcctgattttgccttcctagtgttgggattacaggtgtgtgccaccttgatgactttttacactggttctggggatcaagtccaggccttcaaacttgcacaacaaatacttgcctaactgattcatcttcctacccccacggttcacatttttataacacataccatttgggttactcacagttagtgaagctagatgtaggcacatgatgattctttgcttaatttttttctgatttgtagtgtgcttcaaaaactttctataatgtagcatgttttctgaaaggctgccacattaactattggttattcagtgaataataacccacactagtatttggtagttaggtattcacagtgtatgctaatccctaagagatgcttctatcatttctagcagactctgagataacacagaaatgaggtgatgctgtttgcagtctattttaaagtacttccgtggtggaggaaacagtctagatataacacgcttgccatggccagtgatacacagatgtaggtccttacatgactattttctccactttgtggaggtaaaaattcttatgaaaaagaattttaaacattttatttaggcttttttcagttatttttatgtgtgtgagtgtttttggcggcttgcctgtgcagtacatgcatgcagtgcttgtaggagccagaagagggcgccggatcccctggaactgcagttaaagacagctgtgagcctccatgtggttgctggaaaccaaacctgggtcttctgcaagagctgtttctgcagcctcagaaaagtggctttgatttttttttttaaagtttgtttaagggacctgggtgtgatggtgcacacctttaatcccagcactggggagacagagcaggtggatctctttgagcttgaggttagcctggtctaagtaatgagttccaggacagtagggctccatagcaagaccttgtctcaaaaacaaatgaaagatttatctaaatgtgtatgcatgtttttctgactgaatgtgtgtgtgccatgtgtgcctggtgcctgcagaggtcagaagacagtgttggatcccctggccttttgtaagagcgacatgtacttttaacttctgagccatctctccaggccttgcatgtgtcttcttaaatccataaattaccataccataaagatcagaacaacccaaacgttcaccaacggatcaaagacataaactttatgatattacagtttactacaataaaaatgttttataggtctaactttttttaatgatatgggaggaacaagaagaggaaaaaactgagcatgtgggtgaaagcaatagtcatgaaaaaccacagtctatatacagatcttcacatgtgactgtcatttccctgaactgggtctcttgttcactctcccacccactctccttccccaaaggccctgggtttctgaggtagtagctgagaccatgtagccttgcaggcagaaccaagaaacaccgtggtagtcagcttttttgtctctgagacaaatgcttgagaggaagaatttgaaaagatgaatgattttctgtgcctcctgatttcataagtctctgcccatagtccagtggctccattctggcctgctggtgagtgtgtgaggaagatgaacagagctgcttcctcaaggcagccaggaagcaaagagacaggaaatcttccatacatggtctttgtgtgtgtgtgtgtgtgtgtgtgtgtgtgtgtgtgtgtgtgtgtgtgtgtgtgtgtgtattcttgttagtttattgtcacagctttgatacaaactagagtcacttaggaacagggaaccagattagattggcctgtggggatgtctgtggggaattgtcttgactgctaactgatgtaggagggcctagcccactgtgggcagcatcgttccaaggcaagtgggcctgggatttaagaaaggtagttaaatgtgagcccaggagcaagcaagtaagcagtgttcctctgtgtcctctgcttcaattcttgtgttcaggttcctgtttaaactcttaccccggtttccctcagtgatggaccaataagctgtaagcttaaataaaccctttcctccccaagtggcttttggtcatggcgcttatcacagcaacagagagcaaattaggacagaggttgacacttcattattcaaaccataacacacagagtagcccttccccatctctctgtagtgggcatgtgacttctcagggagttcctctttgcttcccaacatcctctacctcaccattctgaacatgaggcccttgtgtttctctgaggagaaacccgatgcccagaagaagtagcccaccaccatgccaggtaaaggacaaaggaagatgggagagatgacccctcacacaccttccttcagacctttggcgtctttcactggactattggccttcacagatttcccagtacacccagtaccacccaggagtccgtttttccctgggaaactctcttgagtgtactctcacagggctcaggagaagctctttgtgacacatcatttggatgaagtccacgagtgggaatgaatccatcagaggttaaaaatatcaccagtcatttagaaacacattcttcactcaacatagcagatgttagtttgtaaacacagccctttaaaggcaagggaaggcaagagtagaaacaaaaaagtgggataaaagtattctaaaacaagctgtttttgctgtttccccatctgagttgtttgtcaacctttttattctttaagtatgttcaaaggggaagatgtggggaccattaagatgaatacgatgccatcagagtaaagaaagctcaatgtaggaaaatccaatgtgatgagaggtgacttgcatacacaagccaagggaccctgcattctttgctggtggtgtagctcattctgagcttctaggccatccaaatgagtgggtgatagcattaatagcaatcattaaagtctgagtacgtcctgggaagcggaagtcctggaatttcctattactccaggaggcctttgtgtgacagaagaggcaaaaccctcaaaatcattccttcaataaaacagtgggctgtttccaggctcctcctacatgtagcactcagtgtgggcaaggagcaacccagaagcaaaggttacctgggactcagcggaagtggctgggagaaagcaatccagagttgtagcttttagaggaccaggcccaattccagggcagcgtattagaacatccagcgagctgaaaggagtgtgcgttcttccttttattgaaagtagatttttttctcacataatatatcctgattacagtttcctctcctgatacccctcccagttccgccccccctcctctcccatctggatccactccctttttgtctcccattagaaaaaagcacagacttttaagggataataataaaatataataagataaaataaaagctaacacattggaggtggacaggacaaacagaaggatgagagcccaagagcaggcacacaaatcagagccccatacatttacacactcatttacactctcaggagtcccataaaagcattaaactgagctgggtggtggtggtgtcacctttaatcctagtacttgggaggcaatggcaggcggatctctgggttcaaggccagcctggtctataaggtaagttccaggacaggcttcaagctacacagagacaccctgttttgaaaaataaaaataaacaaacaaaccccaacaacaaaaaaacaaaatccactaaaattgaagctataatatatacacagaggacctagtgcagacctgtgtaggtcctgtgcttgctgcttcagtctctgtgagttatgtccgcagatcatgttgatttagatggccttgttttcttggtgtcttccatcccctctcttacactgtttcggcctcctctttctctgctttccctgagctctgaggggtggggtttgatggagacatgccatttagagctgtgttttccaaggtctctcactttctgcataatggttcgctgtgggtctctgtatttgtgcccatatgcttcaggtggaggcatctctgatgatggctgaatgatgatctagttccctggtcagagcacaggagtgtggtcttatttgactgttgctcgagagtgaacaccaggaatccacccgagtttatctcagaggcttgtctgtgaggttatgactcgttttgattgtcccctttctctgggttacagaggccttcagttcagcttttgtgtgcctccccctccccaacccccccccccagctcactttcctgcacccttaaggacgagttccctgaatctttctgttcttgcatccatcattatcctagagctgggtgttcctgcagagctgccggcatcctgtagatgagatatccaaaggcaggacccagagaacactccacctctgtagctcttggcaaaaagattcgtgccaggcccagatctgcttcctctgctaggctccaaattcccttttcttctctgcagtgaaaatggtaaaggaaaacattccaatcaggaaccgggacagatgggtttacagctatgagacatagttttggctctcctgcagtagacgctggccagtccctcccaggccagtggcaaccaaactgtttgtcttctcctgctgtgtctggctggacttgcatgtgggaatccaccctgggtcctttggctggccagtccggagagctttgtgcaaatgattctaaggcgacttttttttttttttttatctaactctattcatggactcatcatataggcattttattgtagtgacctttcccacaaatcactgatttaaaaacaaacatttgcttacgcaaatgaaaagtttagggtattaaaaaaacatctagccgggtggtggtggtgcatacctttaattgcagcactcaggaggaaggggcagatggttctctatgagttcaattccagtctggtctacagagcaagttccagaacagctaaggctacatagagaaaccctatatcaaaaagaaaaaaaaatctattcatagtcataaccttcaaagtatttaaatttttacaaagctgaccaacttgcttgactaaaaattgacttttgccaggtatggtggtactcgcctttcatctcattgctcaagaggcagaggcaggcagatctctgtgaatttaagttttccctggtctgcacagtgagttcaggctagccaaggctgcttagtgatactgtctcaaaaataaaaaaaaaataccttttgttatctgacttcagtttctaaaggtattttggtatttgctgtccaattaatactctacagctacaatacccctctcccccttgggggtgtctattttgtgattcatattgtggttattttcctatgatctttttgctgcactccctcccctctccacctctctttcttttaaagacaggatcttattgtgacgttctggctggatgtagatcaagctggtttcagacacatatagagctgcctatctttgccccttgagtgctatgaatggctccccaccacttcttgagcctggcaccactcaaggttaagagtcagagacagacatgattcatgcattatccattctcagcagggagaaagcctatagtgggaaagagaatggaagataaatgtccatatactgtcctctgggtgaagtagcaatgtttggttacacttcatcctaccggccatggagggcaagaagcaaaattgtttagagggttgtacttagctgacaattagaacttggagtaggctcagatttcccctagacatcagaggtggccattcctcttgcagggcacactgactttccagggtctaacccttttaggtggcctgtaactcatccctcagctggcttgtacctcttcagctgcccctggcactggaatgtaactacttaagtgctcaagagccttccacaagaaacacaagggctttgcattccacctcctggttccttgccatatgactgtctcccaaaactactgtggtattattggaatggaaaaaacaaacacagaatggctccttgaaaagacaaggcggttgctctccaatctgttttcagacaataggcacttgactgctgccctttggtagacactccacactcaaatagagtgaggccccaggaaagattctatatgtacaccctattaccaggacagtggaagtggaaatttttatcaggtttcaaggatgaaggctgatgaccagtcctgacttcaaagccaagaaataaaattcctgtctgattcacagagacaagattcaaggaagcactctgattggcttagtataagtcaagtgtccaacttgggacctgaagtgccaaagggtaggttgtagaggctgccttttgcttctcctcttcccaggcactcaggtggagagagcacctctctagtctccctcacagagatgcatggtcaggtgacagcaccctagccaatggctgaaagccatggatatgtgttgtggaacaatctttttgtacactgtgaggatctgttgctctcattggtttaacaaagagataaatggccaatagctagtcagggaggaggttaggtaggacctgtggacggggagagagctctctgagatgaggaagggcggagtcgccagggatgcagggagaagcaagatgaacatgctggattggaaaaaggtaccaagccatgtggtggggtgtagataagaaaaaggggctaatttaaattgtaagcactagttagtaacaagcccaaggcattggtcgagaagctgtaattaataagtctctgtgtggttatttgggagttggcaggacagaaaattacatgtacagatgtgcttcgcttcaagtttgggccatcaacgcctcccttacctgcctttctgggccccttttctctgtagttgtctcaaagagagaccattggcatctaccacatgaatggctgcatagatgaagcccagctactggctgttgtgtgaaacaagagatgaacctctattaagtttgtgtgagttgtgtggggtatgcttccacagatagcctacattaacacatgtgatatgttgccagaagaaggcaggagccaaagtatctgggcttcaagatacaccaggcaggtatggataaactgcagtcataacggccacatgcttagtgtcaatagcaaaggtctatcactagtgttgtccgttaattgtgggatgtctggtgagcacctagaagagtgcagaaacccaaacaaatatcccagtatcaggactcataactgccaggcggaatgaagggaaggggattaattcactgggttttatagcatcagctgcaaagagatgttgtattgttcagctcacaacccatagtgattcccatctgcagaaggtagctgggcaggcccacggtgtctgcatggaatagttataacctatagttatgagaagattttagaaaagaccaactatggcttgccttagctgggagaactgagagaaaggggaagaagtaagaaggcctatgttttccttctctctttttttttaacctctgaaattacacttaaaagtatttcattatcttggcctgagggcacacacctttaatccaaactctggagaggcaggtagatttctgtgagttctaggtcagcctggtctacatagtgagttccaggacaaccagggctacacagtgggactttgtctctaaataagtaaataaagatttattgtaggaaaatataacatgaaagttaccatcttaaccatttcgtgtgtgcagctgagcaattaatgaagcatttatgattgtgtacctcatctttagaagtctcaccttgaaaaactcaaaagtccaatctcattcgttaccgacttcccatttgcctattttgagcttcagtaatcactttgtgtgtgtgaactgggcttcttaaggcacctggtgtacgtggaatcacacagaatttacctctctgtggctggcttatctcacttaacatatggcttttaagaccatagtgtagcatgtctctccagtccctccttttaatttttaaacattgtattaactgtaagaactaacatggttcaatgagtttccacacattcatataatatgcacagataaaagaatgttctcggttttcagagataagtaatacttcattgtggatagacgcaggttgtgccatccttatcccaaatgcttagaatcagaggttttccagatcttgtgtgtgtgtgtgtgtgtgtgtgtgtgtgaattttggaacatctgcatatttatggtgagaaatcctgtggctgggacccaagtctaaatagaaacccatggtttgtgtatactccatacagcctaatggtaactcttacataacactttaaataattttgtggatgaaatgaacattcactgtacagaaatatttctctgtagcatgtcagccactcagtgtttggattttggaaagttttggatttctgatctttggttttaagatacttcacttgtttcctggtttctgtccactcacagtccccaggtggcttccacctctgggctactgtgaacggcttctgtcaacatggtgggagagaacccattggagacctgtgcttccagttccttgggatacacatccagtgggatttcgcagcctcacagtaagtctatttttaatctctgagggactgtgactttggagctttccactgagaggatgttatctgtccgaaataaacaccagaagaatgttaatgaccagatgaaatggtgtgttagcaggcgatactgtccaaagaactgcaggcctggggaagctttttctggcaagctgggccatgactgacagtttcgtcagtctcccttcctgccatattgaccttgctgacccactccccaccttgccaatgtctgggccccatagctatgtctcctcagttgagtgaagacatggaggctgacctctggccatcagaagactggaggttttcctaggtggctttttaggcttctgtcaacagctccagtttgcatgcacactccaagctgtcaggcttcgggctgtcagggagaaatgaattcagttgcaagcactagtttggttgtgaagaaggcaggctgtttgttagttgatactctgaaataatatttgggtcattgtcttgcttggtgatcctgtcagctttttctcagtcatatcctccttctaagcctttgcagtatttaaggaagaagagtgacatttgtctccctcatatcccaaagcctggctggagagggcttactctgggatctgtggtgttcctgagtgtggaatataaaattcaaggggaaacatgactctctgtattttagaacagcttactggaatataatgcccaaatcatgtaatttacacacttacattcggtagtttgctgtgtattcacagggttggggaactattacaatagtatagtttcaggacatcattcccccatcctcacaaagaaacacaatacacatttgtagcaataccccatacccacccctcactccattcctacctctctagtctcaaccagtcatctatctttttgcttctatagatttgcctattctggaaattttatctaatagagaaatatggtatgtattctttgtggagctgcatccgtgtagaaacctgtaccaatgcctcattatgtttatgcttgagtaataccccattatatggatacatccattggagtttaccctttcgtctgtggatgggaggacaacatctgggtggtttttacttgttggctattataaatagtgctgctatgagtatttgcacataagcttccgtgtagacaaaattttcatttatattgggtatagatagaactagctgtgggatttctgggttgtatagtaaccctgggtcaaatgttaaacttattaagtaactgccaaactattttctaaaatggccactccactttctatcccaccccccacaacacatcagagtttcaactttgtctcatcctgtctaacacttgttatttctaccatatttgtttcatcatccagttgaatgtgaaatgataacatgtttttctcctaatggttaatgacattatcttttcatgtgcttgttgcccttgtaatctactttgagaactatttaggttgtttgcccatttttaaattgggttacttgccttttaattagaattaattagaataaagcctcttatcatatacatggtttatgaaaatccctcccattttgaggatcatcttttcacaatcttggtagcattctcttttcccccctttcattgaaaatagatttttgtctctcacaaactcacctcctgatgacagtttccctccctctactcctcccaggtcctccccactcccctcccatttggatgcttccccgtttctgtctcagtctctcagaaaacaaacacatttctaagggataataataaaataataaacaaaaactaacacactggaataggacaaaacaaacaaacagaatgaaaagagcccaagaaaaggcccaagaaacacagatccacttgtttgcacattaaagaggtctataaagacactaaaccaaaagccataacacatacacaaaggacctgtaagtgtaaaaagagagaaaaggtataaataaaataaataaacaaagaaaaaatttgaaaaaaagagaaaaatccctgacacaacataaaagaagaaactttcaaagatgccattgagtcatttttctgttgcccatctactgctgggcatgcagcccacccttaggagtagtttgtttcccagtgagactcccttggaggagactaaattttcatttgcacgtggtggttaccaattggagacagcttccacttctcctttcagctctaggaccccatctggtgcagacctgtgcaggcctccatctttgtgagttcatgagtgtgtcagtcctgttgatttagagaacctgtttgctcggtgtcctccatctcctcagactccctcagactcttcctgcctcctcttctgcagagttacttgaaccctgaggagaaaaatttgatagagacattcctttttgggctgaatgttccaaggtctctcactctctgtagaatgtcctgctgtgggtctccgtatttattcccatctgctacaggaggaaacatttctgatgatggctgagcaaggcactgatctatgggtatagcagaatgtcattaggagtcattttatggctacattttattttattttttaaagaacggtagcatttggttataccctaggtccctgggctgtctagtctcaggttcttggtcacccaagcagtatcgggtatggtttctatcttgtggcgtgggccttaagtcaaaagagatattggttggttattcccacaagatttatgccaccattgcactagcattgcttgtaggcagggcaccattttagatcaaagactttgtggccgggttggtgtttacgtttctcctttggtagcatgtagaatccctttctgtaccaaagacaccagcatgtaggggtgattttcatgacctccattgatctctttttttttgttggtgttctcatcttatactttgatgtcatagctaagaaattgttgcccagctaaagattttgaagattacttctatactttttttgtagggattgtaataatgtagctattacatttgttttaaagatgtatttaatttacattttatgtgtgtgttggtgcctacatgcttatatgtgtactggtgtgtgtggtacacgtgtgcctggtgccatggagggcaaaagagagcatctaatcccctgtaactggagttacaggttgtaagccacctgctatgggtgctgggaactgaattctgatccactgccaagccagcaagcactcttaatcattgagctatctctccagcactccatttgggtttatgaattagtattctgaaacaaatcttaccatgtagcccaggtgaggaactctcattgtctcagagtctcttgagtgctgagatcacaggtgtgtgccaccaccaacattttacaaagtgactttattccccgagtgaatttcagtgcacaacggaggacagctgcagtccttcctttgcactcggtgtgcacgcatgtcactgtgctgtgtgttgaagcaggcattccccatctggcattgttgttgaaatataattgactttaaatgtgttcatttctggtctcccaattctgtcccatacatctagatatctgtctgtaggcaagtgttatcttgggcagactactatagttctgtgcaaagttttgggtcacaagttccttggccatatggaattgatgcccttgctttagcagtgcttggtagtggtgaagtgtcctgtccatcgattacttcttacatcgtgatgggacagggattccagtttaaatgagaagggattgaggggctcacatgattttaactttccagatttccattttgtctttctcaccaggccgacatgaatggaattcacagacgaaggtgaggtttcttcggctttaaatgcattgtctcttttaccgctttctgtttccaaatagatctttctagatcttgaatagagtttattagatttgccattcttgcctgaaaaaaaatgtttccattttccttagaagtagaatttttgtccgagggtgagtatagcctaacaccagggtagctagctggaccaggactgaaggccccatagtctcttccccatgtcccgagttttacctgtgtcctgagttttacccatcaggttagctctccatgtaagctgtagccttccaagacaaggccagaggtagatcacaaaacctttgactccaagccctcccctccatagaaaagcccgctttcccccttagaggctatttgaaaaaggccaggcaaataccctgattggatggttttgatcatgtgatacgcaggactgctaataagagcctgctgagtactttgaggaagggttttatttgcataaaagcctcttcagaaacctccttttgggtcaagcattttgttttcagtttacaattgctgtagtcattgcagaactcttatttataaacctagcaactgtgaatcactttttaacgaacctttaactgtttggtctgcttaaaaactcagccaattaaactatttcagcatttcaagcataatcgttttaatatgtttggttttcttcttgaatattttaattgtttgactagtcagtctcccgggcttgtaaataatgcccaggaatgcagtaaattaatctcacaaggagaaccctgcattcttgtaggcggtctgatacatgtatgagtttggcaggcttccaacagggtattgtttatctaacttggctattcagttgcctgtcttaaagccagtgtcactctcaaggttaaagtttctttcatcctgtaagtgcagaaaacaccaaacaaagacagtccagctcttcagaacaccatgatatcaatagcatgcttttgatgcctctaacttgtttgtagttacttaaatcttctccattgtaaagcttgtattcactaagaatcccagagaaatcagctgggttattttgagatttttcaggatgttcattcactagtgaaatgtgacctgttctaagctgtgcttttcctcaacaccatgacatatctgtaagagggatgtgtcttgccttgctcactgataactgacagttgattgacagtagttatcctttcttagtgaggcaaaagtaatgatgctttaacttagctgaggtgtggtaccacctaagttagctgggtctctctctctctctctctttctctctctctctctctctctctctgacacacacacacacacacacacacacacacacacacacacacacacttgtcttaccaccccaagttcaggctaagtgtaaacctaggactgtagacattggacatttcctcatcactgccctgatgatgtttttgttgttgttgtttgtttccatgacatggcatcaatttggagcctttgccagcccatggaagctaccagccctccatcactggctcacttgataggattttcgcttgtgtgatttttcagtgtacaaacttttttttttgttgctacttataaactgatatgaatctatgaaatttaaatctatttttaactgtaaagatgttcacatttgatggagccctctgtgctttccatgctcttgttggtattatcctattttttgtccagtttataagttatatatttaaattatgataattattttcctaaatatttcttattactttgatgaagcacccaggacagaaccaaaagtgaagtatatgacatactgaacttgttctaaatttaataactattatcttgaattttcttgacaatttgaggtcactataattgagaaattatgatcccagtactcagctagtggaggcaagagaatagtatgttcaaggccaacctgggctacatagcaagatactgtattgatgggggagtgtccttctgtatgctttgaatgtatgtttcccttattggtttaataaaatactaattggccagtaggcaggaaggaagtataggcaggcctaccagactaggagaatactgggaagaaggagtgagtgactctcctgagagacaccatgtagctactgggaagataggacaccagacattctccagtaagataaggccatgtagaaatacaaagattaataattatgggttaataattaagagagagctagcaagtaagaagcctgagccattggccaaacagtttataattaatataagcctctgtgtgtttatttggaactaaacagctgtgggacaaggtgggaaaggaactccacctacaaatggcacccccaatgtggggcaagaatttccacataaaatctgacaaaagcttaaaaaggattctgaacacaaaagaacagaagcaagcacagcttcttagtagcagcattttctcgggtgggctcctttaagagaggcttcctgactcagcattagtggcaaaaacagcaaggcttttttaaagaggccctgctaccaaacaattaaatggttttacgagtagccaatggcatgcttcttgatggtgatatggacctagaaactctgcagagttgtgacaataagcatggctctcaccagtacctccaaaatgaagccaaggcatagggcaggaccagctgatgctttaatcttagccatgctgtttagcagataagactcgtggtcagaaaaagatagagatatacagtaaagacttattcagatgaagaaaaaccactaaacggtttacgatgtgttaaaaaatatgcataggcttgggagagaaaagaaaaagaacagagaaagtctttaaaaagaaatagagtagctgggtatcatgggtggcacatgtctttaatcccagaacttgggaggcagaggcaagtagatctctgtgatttcaaggccagtctggttccagagtgtgttcaagggtagccaaagttacacagagaaaccctgtttcaaaaaaaccaaaaattaaaaataaagaaaaaaccctggaataataagaaaagccatgtaaagatggaaaatacacagagagtctggacactatgttgttatgttgtctttgaattgtctgctgaggaaggagctaaaagacatttgattataaatgctgttggattaaaccaacatatattttgaaaatgccttgacttcaaaatttaagtctaaggacatgctactttggaaaggtggttctgtttttgttttcacagatgaaaatctatggattccttctagactaacatgttttgatcaagcaagacccccctgaagcagtggcccagatgatccaacatctaaaacagctgagaggatgcagcctcatactactacagccaagatttggccatgtttctgggtttgttcgggatacccatgggattgatagcatccccaaatagcaggaagcagtttagagagaactgcacccaaattcccaaattgtttataactgcttggttttcatttaaatggggttgcttataaatgtttaatgatcacagccaatctctttctaaaggaaaaaagggaatatgatatagaaatgaatactttttcatttgtatggattttggtttattgatacaaatttaagatcaattttgttatatttctaccattgtttaggtattgtatttatacagctctttaaaaaatgtaatgtatagtaaaatatagattatagatagtaacctataatagtcaaaacttattgttaggttagttaggttttctagatatacagagatacatttcaaatggatagacattctttaagacctttcaaagacctacagaatatgtcacttgaagtggtttattagggtttttcatgacaatgagacacaactgctcctggcaacaccaattatgtcaaagaggaagataggcatcgaacaaactcattatggaatttgccttcaatatggtaggaatacccatttagacaagaaactgctcttgcctggactgcttgacagcatgctgtccaaactggacaagcaggttacaaagaaaagtgactgctgaacttgccaaagggacaggatgatccttcaagtttcctgcttcactaaaaagtctgccagacactatggtctatgggctaaagatggatgccccaacattgcagaagaactttcggtgattgtccagaaagtaaaatgtctctgtcaattctggagtttatatattatcctgctgaggtctttgttggagttgaagacagatagttatggttatggttttccttggttatgataaaaggtaagttacatataagactttaaactcacaaagataggatagatgataaaatgtgttctttaaattttgccaaatgttaatggattaaatattttaactatagttcttacttgatgactattttgttacatacaattttactatgttaaaattaaaacctttcttttaatttagacaaaaaagaggagatgatgggggaatgtccttctgtatgctttgaatgtatgtttctattattggtttaataaaatgctgattggccactagccaggaaggaagtataggtggggctaccagactaggatatgctggaaagaaggagtgagtgagtctctggagagacactatgtagctactgggaagttaggacaacaagcattctccagtgagataaggccatgtagaaatatatagattaatagttatgtgttagtaattaagaaagggctagccagtaagaagccgagccattggccaaacagtttataattaatataagcctctatgtatttatttgagactatagggctgagggaccaggtgagacagaaatgtccatctacactgtatcaaagaaaaataaaaggaaaaaggaaatcatgtgacttaagacataaggaacattttgaacaggtttatagaaaaaggattcacttgttaccaatcaacccacttaaaacctacaattccagctgggcattggtggcgcacgcctttaatcccagcactcgagaggcagaggcaggtggatctctgtgagttcgaggctagcctggtctccagattgagtgctaggataggctccaaagctacacagagaaaccctgtctcgaaaaaccaaaaccaaaccaaaacaaaccaaaacaaacaaaaaacaaaaaggaccctacaattctatggtctttagtgcagtcacatgtatgtgcaatcattatcatagtttttgttactcctcaccctccatatctttagtgccacacccagccttgagcaatcactagtttactatagtatgtggggtttttgcaattggctaacttactttttgtaattgactaatttatatctagtttcatctagaagactggacattgaatttgatgaaaacattttcaggaaacattaagagggatattcttgcttttttattcttttatttgaacatctcacatggaatcttcagacttgtcaaattgtggaaatccctccaattaacatgaaccagccaactgtggtctgcaggacaggtggcttccctaggcttcatctctaggcaggaaggtgggtcattcaaaactatggcagccctggctgaatatgcttgagtagttagtagttattttccttgtgactgtgactaaatgaccaatagaaataatgtaatgaggggctcagtttggctcacagtttgagggtgtaatccatcatggagggaatggttggtggcatgagtgtgaggcagctggttacactgcatatgcagtcaggaaacagagagagaggagtactattgatcaactattttctcagatttactcagtccaggactgatggggaatgtgcttctatgtatgttcatcttattgattattgaataaagtactgtttggccaatgaggcagcaagttagatgggactaggagtcaaagaggattctgggaaatgtagtaaagaaatggtgatccaggcaggaagtgacatggcagggagactcatatttaaggaaggacaagcaggaagtgttcccttttcccctttgctcttcctctagcagcacaatgtgatccaccggcaagggaggatgccaatggaaggtgtctgataagataaatcttataaaatatatagatttgtgataattaagactgagctaacagatgagaaatcctagtcattggccaagcagcatttgtacctaatacaagtctctgtgcattaatttgggccctaacttggcgggcagaactcaggcagctggtggagaccacccacatggcagtagggctcgggcagcttttgtcggaaagatttattgtaacacaggaccctaaaccctaggatggtgttgccctcattcagagtgagttgtcctcctcacttaatcttccagtagaactaccctgagacatgcccagaggtgtgcctcctaggggacttgaaattcagtcacattgacagtgaagatgacttatcctgggcatagcaaaacagtcactgaaaattggacagacacaattaaatgtcttccttccttgactaaggtattagaaatcctttattcccagcctatgaattctttttttttttttttttttttttttttttttttttggtttttcaagacagggtttctctgtattgctttggaggttgtcctggaactctctctgtagaccaggctggccttgaactcacagagatccacttgcctctgcctctagagtgctgggatttaaaggagttcagcaccaacctccggtgagttctttaattatggatgatgctcaacacaaaatatctctgtgctgcactgggaaactgaactagaaatcaggaggtttaggttttttttttctgtgtctttatagtttgaattaaagaaaaaatttctaaatctccgattttttaaaaatttgtttgttcttaggaatggggtcttactgttttcaggataatcttgaactcctatgctcaaacagtcctcctgtctcagcttcctgagtagctgggacaagaacattgccacacttagttacctttgaacctcaagttcaatcctccctcctttcctccttaccctctttttcctgttctcttgacagagtctgactgtatggccagcggagtctcagacttatgatccttgggccttattctccttattgctagagttcttaattaatagatggctaaaaattaactgttgggtgtggctgctggtgattttaaatgaggtaatatgcctgatgttgtagctggaagatagatggctcagtggttaagagcatttactcttcttgcagaggacccaggttcagttctcagcacccccaaggaagttaacagtggtatttccaattccagacggattggacattctcttctgacctctgcagctactacacaaggtgtacagacatacatgtaaacagaacaaccatacccataaaataaaaataaacacgtcttttaaaaatatgccttagttctcctgcaaacctaagaagctctaagcatccagtggcggttttctggtctccattccctacatagttgctgcataagcccctgctttctggaatggtttcagaatttgctctcaggtttctcacctgagagcattctcacctttctgttttgtacagtcgttaaggtcggtgctcacaaagtctaatattagtggctttatcttttaaattccaaactcaaggcactttggtagttttgccaagactgtacccacctgccttttccccgaacactgaaagctcacaccacggtctctgtttagaccttctctcaccacccaaacccagccaggatggtgtggctgcagttccatctgtgttgttagaggcctggcacaatcaggttcatctcagtctgcaaagcctctccatggaggaggggacatagctcctgtcctaaaccatgagcctggcagatcacgcctcagtgagtgggacaccagatattccagcctcaggtagcctgacaccagggccttgggctctgggttctctttaagcttcatttaacacacacacacacacacacacacacacacacacacacacacactactctaaactctttcctggaatgatatcttggtcttcaaggtgttcttgatagatcaacacctagatcttcaaggacgtttctgctaaacacacctgcattaaacactccttactccatcacagacctcctacatcaacacctctgagggtgtgtggccttagaaaatgaatgacgttttcagtttccctggtaaactcaatcagccaccttagacaaaagtgatttacagctttgacttctacagaaacttgaaactacaggaaactctgataccataagtcacacacacacacacacacacacacacacacacacacacacacacacacacacaaacacactagcttatttaccctagaaacttgtgaagcacaacttttaagacagttggcttaagtcaatgccagaagaatttaatttcaacaatgagaaaatggctgaaacttgcttggttaacatatgaatccgtgttggaaccaaagtattaaacgttcttcacgaccactttctatcattaatttggtctaatttgcctagccatgctgagtttcattcattgattaatccacatttattcttttaacaacaagacctacacagccctttgtgttgtgaaatggtccctggaactctctacactcatccatttccctacaccctctcatacattggtgtcctctagagaaactgcagccatgaggctcaaggactcagagtttaggagggggagtttgaggttttgtcctggatattttggatccatatagctcagtgtgcttgcctttcttagcccttactggcagtccaagaaacagtggtggtaaatgtctgaattgcaggcttaagaacatccaagtgattgtgttgtctcagtaactaagaccagagaaaacctagactgatgtgagagcactgagtggcggcaggcgccatttccacctgtgtgcctaacagtcacctgtgtagcaagagcatttggctggaaaccaaaatagccccaatgcaacacatgtacatgtaagcttgcttttaaaccaaatgctctacttttgccttcaaacaaaatggctgttcctagacctctcctatatgataatacacatgtgaaaaccctgaagtttgaatactttcggatagttctttcagtttcatatacgggacctaagccgtccagtagactggggatccattgggctgaggaatgttgtgatcccctcatttcagcacaccacaccttatcatggtttaggaatctgtagaacatactttgagaagttgctccagagccacacagttctcttaactcagagaaggtcttgtctttttgtgaactgtaacaggtggaggcaggctgccagggaacatgctttgaggagagtttcttcagcagctcccactgtgacaggaataatgtcctttaattagctttgctgggtgggtctgctacgagtgtggaaggaaccagagtgagctgaacagtgtccagagagcagagttcctcagttgagaaggctttaagacttggggtagaacttgagtgatgggcagggggaaagtgggtgggaattaactgacccttcttgtaaatgactttgatctcgagaacaattgactctggattccatgaaacaatacagtgcaactgttgccaacttgaacttttacctatattaacaaggcatctggatcaagttttccacagcttcttcctaatgttgttatttttgtaacaactctattgagatttaattcactcatgtgtacaattcatccagttaaattaaggatataattcagagtttttcatatattcagaaatttgtgcagtagtcaccacagtcaattgtagaatacttttatcatcctggggggaaaaacacaaacaccaacccccatattcattagctattacctgcccccacaatatctccgtttcttcaacactcaacaaccacaaagtgacctactatctctctgaacttgtttgctgtagacattttatcgaaatggaactgtatagtgtgtgtcttttgtgactggcctttcacttagcatgtttccagggtctgtccatattgtagcttctatgaatccttcattacactgggtgggcaccccacattttaattttatgttcatccagttgacttacttttgggttgtttctgtcttctgactatggagaattatgaaatgatttttgtatgcatttaatgtagattcatgctaactctttgtgtcactttttgaggagctccctaccctgtgagggggttcagttaccaccatccatccctacccccacctgtcactcaagttccattccctacctattttactattatcttgtacaccaagctggactcagtggcttcgagtcattgttgtaagagatctgtttcatacagctcagtcaagtatgacttgaacactcaccggaagcaggtgtttgtgtgaagtggggtgtatcaggctctggttacaggaatctcaagcacaaatactggaggaccttaattggtgccactttaaaggttgggacaattctgtctagatttgtgtttatggaaacaagaaaaagaaactcacagccacaaatgttgacaaaaacagaggagtgggtcggggagagaaacagaataacagagctcccttaggtaggagcttgaggaaggccctgtgaccatctaaggagtagagctggtaggtaaaaaaaaatctatgagtttcacttatctctgctactgtgtgtttctacatagagaagatacctagaaacttggggcatttgaagtccttacgtagatcttaataaaacatgcagaagcagatagtccctaagtgtaatggtatggattttcacaatgacccttgctgtgtaattactctggcactaagaaatggattgccaccagcacctcctccaatcctgtcctagtcaaagtattcccaaggaaaggagggtactgtgacttctaccaccaacattcttagacacaaggatgcatttttaatagtgtggttcaggtgtcaggtgctggccaatggaatagatttgtttagtggaatgtttgaacactcagcagacatactatattgcaaggtgtcatccagccttaacaattaaatacttttaagcttgtgtttaaaataaaagttataaccacagcactgaagaaacttaattcatctttacctgcaatttgagagcatctattgtaggtttttttttttttttttttgtacacaagacatcagacttccagcatttatttacaaaaacatatactttcccctccaaaccctgaagtttattcctgggagcagtctgaaaggaaattccaggcactattaatcccaggcacaggtggtttaatgatttaaagattgtatgtaaacatatgaacactggtaatacattacacgatatgaagcaatgacaacataaatacagcctttacaatcagagcactcagagaaacctgcatttctcttgttctagtgaacaggagggaattaaattccctcacctttccaataagacaagctttcaaatactagaactggctgcaaactgacactgctctggctcgtacctggaaaagaagcccattatcagcagctcacctatgatacattagacgtctagacattctattaggggaaaccattgtgcaaagacgaataattgctttttctttaaagttcaatagatgcatcacaaattactaaagtagattacgatttcattagactatttcctgggaagtttgggattctgtgttctatcaggtgatgccaattagctccgggtcaaagctagaaggatggagcctgtgccaactgcacagggtcgccctggcctcttccattgtgaatgctgggtagtaactcccaaggtaacttttgtcttactactcttgttcccactctggtgctgggaaagcacctcgtcctctccccgcagggctgcagcgtcagcgccgggaatcctcccgcggaggtcatagatacaggtcgcactcccaggcagtaacgtccagggaagcatcatcttcccgggcttggaccttttcccgtcggggttgccagcagcccctcctcctagcagggggagggggagaatcactcgggacttccttcccatttaaaggtcgtcagggtctcccactttcaggacggtcctccgaggtacccgggtctacaacgcttcccttggcgccactgttggggacagactatgaacggtgggccgtttcctgacgcctttcccgtgtgaccctgaagcggcggtgcacttgtcactgtgggtgaccgagagggatcggcggggggcgggccccgcggggcaggtgggcgcggccggcgcgggccgcggcagcaagtggttgggccgtgcgcagtccgtcctgctcggcgccggcgcgggtgcccggtgcgccgcaccctccgctccgctgagccacccgcccgctgcgcgcccatgtctctgcccgtggtgctcccgggttcctgctgcccggtggccgggctgtcgggcggacctcaggccgggggtcctggagtcgcgaccaccgccgcccaggagccgccactgcccccgctgcggccgcgctggccccggggcgctctgcagcctccagctcggccccgctgcgcccccgccgctgtgctggccccgccacccgcgctcgcgtcccgccgccccgcagcgcctggctccgcgctgctgcccgcgcgcccactgctgtcgctcgggctgttgcagctgatcctgggctgctgcatggtggcgctcagcttcggggcgctgtcgttgagcagttcgcctcaggtgaagaactcgtgccccttctgggcaggttcctcggtgagtactgggtgcctctctgtgggggtccgccttctgggcagtgggttgtggagggtccctcctgtgttttaattttgcctcagttggggagctcagaccctcaagccacctaaagtgtttggccacattgagtgggggaaaagtgttgggaggtagtcaagttcaagggagaattggattgcacccgggcagcgtctgttcttacacgttaaggattttgtttccagtcaagttaacattaagcacaatattaagttctttgagagagtggcatgaggatgggagaaaaatgatttcaaactttgttggccactgtactacactggcgaagtaaattcctgcagggcagggattttgatgtgttttcctcaccgatacaccaacaatacccgtgcagggtggggtacttttggaatggacaaagtgacagatagaagaggggggaggaggagattgatttgtttttattcttcatttaaacacggataaatgagagtgtatctggtgttgggtgactgcaccctgaggagctcagaggtaataagaggttgtgtgtgactggtggcttgtacctggtcattagaggagggttcaaaccctgggtgggttcttggagccactaaggttgccctgcagaagtgggtgctcaagaaacagaacctgtcattatggatgcactcaatagaattccagaagtgtggggcagctagctggggatatctgccctgccctggcaccttgaccaatgggttagggaagcctgcctctgagaacagtggctgccagtgagcaagcgtctgtagaccagatgggtactcattcctgcctcttaactgtgtcacaactttcagggcatccaaccccttgaggtttgccaggggccaagagccttggaaacaggtctttgtgcaatgcttgtggaagatgagtaaagcaaatgacctctctatgaactaatgcactctgagagcctggtaatgtctatagctttttctaccatctgctctacattttgtgctctactggtcaaagcatatccagagtcaagaccaaatgtaaatttcaaaaatgtgggagaacttattgaacctagagtaatggtttgaataagaacatgaagagcataagctttctctggcctaactcagaattttgtatcacccaatgtcaatctactcttttatttttgtttgtttgctttttgtttctctctctctctctctctctctctctctctctctctctctctctctcttcctgagacagggtttctctgtgtagctttagagcctatcctggcactcgctctggagaccaggttggcctcgaactcacagagatccacctgcctctgcctcccaagtgctgggattaaaggcatgggccaccaatgcccagctttgttttttgtttttcaagacagggtttctctgtgtatcctggctggttgtcctggaactcgctctgtagaccaggctggccttgaattcacagagatctgccttcttctgcctctgaagcactgggattaaagatgcatgccagcactgcctggcaatctactcatcttttttctttcatatatctgtatatatgaaaccttctatttttaaaataatttatttaactttatttttatgtgcattgacatgaaggtgtcatatctcctggaactggagttagagactgttgtgagctgccacatgggtgctgggaattgaaccctggtcctctggaagagcagccagtgctgttaacctctgagacatctctcttttaaacacctttgctaaatggttgggaccccagtctttttgtgctatagtgaatgaagttcacaacttatgtattagattgacagaatcccaccctgtagtcctgtccctggactctgctactgtcttgtgagtgttctggaaaaccttgaaatatgggtactctaaatagaataggaatgagaataatacccccccccccaggctacgcatccaaatggtgactgcatttctttccgataagtaccctggaccagaatcttgtatgtattttatggatttattctttgtaaaatcataattcagcattctctcaagatagtttattgaaaagatttgtggggggcactagggagacagttcagtcagtaaagcatggggacctgagtctggatccctagaacccacctaaaagctgggtgtgggcagaggggagtctgtaaccccagtgcctggggtgggcttgggagaaggtgagcacaagtggattcctgaaggtcattggtcagtcagcctagtcaaactgatgagacacccagtctcaacaaatgaaatatggtagaaagtgtacctagtgtcattctctgccaccacacacatgcagggatagtaacaagtacatacaccacacacataacctacacacacacacacacacacacacacacacacacacacacacacaccatggctttttttttcttttctaaaattaaaatctgaaatcattttgcaatttcgagttacttcagaggtaaggagatgcccttagatgtcaatggagccacaatgggatttgaggaaatggaaaacaaagctcacaaaacagaatttgcagggtggtgctgtgggttcactggccaggcttgtcctcggcacaagcaaatcagacccaagaaacaatcagtgacttgaacctgagaggttctttttgtatgtcttagtctaccatgtgcccttgggccagtatgcagatctgtaactgtcacttattctttctttgtgtgggtgtgacctgttcctaaggtagacttcggaatttgcaaagtagcaacagaaccaatgaataataactatattttcagaacaagtgaataggggttaagcagatgtcattggactccatgaatctcttagtgttttaggaagaaaaataccaccctgtatcatgttttaaactcacataggtaagagagctttttttttttttttttttaaatcctgtattaggagaacatttaggcttaagaagacactgtataacaagaccacacctactctccaaccactagaacaatggtcttatctgtccccactcctaggctttgccactggtcctgtgtgtcctgaaagatgccagagcaaggaattagggcccctttactcttagtccatttagcagattaaaattttatttgaaaatctcagtattacatcattgtaatttcatgtgtaaatgtttcaatgtgtgtatttttagacagagctcacacacacacacacacacacacacacacacacacacacacacacaggagagagttcatagaagtgactaggaagtcctaaggcctcctttccagttttaacatttcattatggaaaaaattaaagttttaatgaatgtggaaagaggaatggaatggccatgtggggtgacccatcaccagtcacaggcgcttgcaatatccgaatatctgacactgcctcctcttaacacaatgtgttattcttaggcaaattatggatatgtaacttcaaccattaaatactccagtgtatattctctgacactctaccatgaactcagatggccgaatggaggtttttttttttttttttaatggcaaatgatgaaaaactgtgacttgaggactggaaaaatgaaaacaaaacaaaacaaaaaactactgagctgtagtccaaatgtaaagagagccttctggtagtttccagtgagctcattgttgcatagccattcaccaaaatgagtttaggaagttctcaaaatcccctgatagtctttcttctctacatctttctgtccgggtgccacccattttcctattttctggccctgtagactactactatcctggatatttcacgtctgtctgtctgtctgtctgtctgtctgtctatctttacacacacacacacacatacacacacacacacacacaatatatatatatatatatatatatatatatattcatatatactcatgaatatataatgtatgttcttttaaggataaataacttctaattagggtattttttaaggctcatccagtttagcaacaactcgttcctattaactgtgatgtgatagaacattgtgcagacatactgtgattatgttcactcagtttctctcccttgctccctccctgctgccttccctctcctcccttccttttttttctttcagatctggggattgaactcagggtcagaggcaagagctctacccctgagctacatccctggcccactcagccgtatatgacctggtcttaagaggaatgaccaacaagtctaatgcttcttgaaatccacgtgtggtttgagcactggagtgaaatctcctcaaactgaatgaccacgagcaccttacagtttgcctcatccctgaaactggcaaatcttagtttggtttttgtaaaaatatttgttttgtgtttgatgcaacagtggttcaaacacattcacttgaaacacatcccatttcgaggatgttcctccatgtttgtctctgggaggggtgtccctcagaactgaggctttccccacttgtgtgaaccctgaggagctgtttgaaaatacatttactaattaagtcctgtaagccaccttccccacaatcttgaattaatatttcagcagcgtgaagggactattttaatataatctttactttttaaattacattctttatttagagaggaggtagggagggggagagggagagagagtatatatatatggcaaagaacaacctccactctgtgggtcccgggaatcgaacttagtttgtaagacttagtggcaagtgcctttaccttctgagccatctcagtggcccctaatgtaatcttttgtatttgactgctatacatgtggctcagtgggtagaacaccagcctagcacaccagagaccctgggttcaatccccagcactgcctaagcaggagtagtggagacacaagggtctgtcatgtagttcaagtcactggtgaggagggagctgccagattggtacttccagttcatccttggctcaggcagctcgaggttcacctgtgctacactgggccgtgtgtcagaaaaaaaaaatgcattcagatctttttatttgaacattctgtatcatttcccccttgccaaccttggttaatgactattatgcccaaacttgtagaaccaagggattagccggccttctagaaacatagccatattgttggtgagtggctgaaggaggatcttgatgtctgtgttcaggttgtgttgtcctggctctcagtttaggcatgtgtttagttaatcttattttgattccattgggattgtgggagatggcacccaccacactgagatacgtttaattaaagagtagagagagtggcactggtttgcccatctgatttttgaaaaacaaaacccccagcttgaatgccacctgtgatccctgggagcaatttcagatgagaggcacagagctggccttgtgcagctctctccagaggccatgaaacatcattcgtttccctctgctccaagtcagtaacttgaactttcctcatccctctattgaatctatgatgccatggcaagattccagtttcatataaagaatcatcgaggagaacctatttaaaacatcattatgactaagccaaaaaaaaaaatggctagggaaaaaactgacataaaagccctgaagttattaccagttaaacagtagtaaatatgcattttctgtcatgttcattagtttctactggttccattatatatatatatatgcacacacacatatatatatttcctatcataaatcaaacatttaaggagcatttgaaggtagtattttgagtgaaatttattgactttctttagttctttgttttacaggacaacagaatctcacttataggttttttgccttgagtaaattactcatatgtaaaatgggtgggatactcttgtcttaggactgattttgcatagaagagcactgtgggaaaaggcttggctcctgggcctggcacatactaggtagtgtgcatacttttcaaacaccaagacaaaaaagtgtataaccaacgtgaagtgcctaggctgtctatagtacctactgtgggagttctgctcactgctcagtcactcagatttttcaagtgctataaaaagggaagaaccccacccccacccctgccacacacctttgcagttatagggaaaaataggttgttgagaagttagataaattagtttctgtctatttagaagataaacacagggcatttgcaacacggctttcaaacatctgtgtttggatccagcaggttttgacaaatgagccagaacatttttgccctaaggcatgtttgtggattaggccaggaaaatagggcagtagaagtataagcctttgattttaaagattggtttttaagctggaaaattaaaggcattagctgcacatggtgggtcttactgactcggagctgttgcacctcagatgcttcctttgcattatcaggaagaggaaagatgttttgtttccatgagccacaaggagggaaacagaaatggtatggctctgattacaattacctggagatggtttggcattaacagtaggttcttacctgcgcattcagggcatgttgtatcttgtgctgggtggaagaatgttgatggcgttgtcctttcaggaagcacgggggtgcatatgtgctcaggcttacgtagtcaccctttagcacgctcatctcctgtttcttgtctcctttcgtttgttcactcgttcacttattcattcattgactcttgcggtaaccaggtgctttctagaggctgctcatggcatttgagtgaggtttcccaggcacaggccatcaggcagtagtagcattgtggtatagtaaaagccatcaaaggtcattcctaagggacttcctggactccctcctgacagagcccagctaccgctgccacagagggaggcggaacctattcttgccttccatgcttggatgccaggaggttcaagtatctgttccttgggtcttaaaggattcagccccagggcagagccttagttccctccacatttcagaaggcttcctctgttcctccttcctccctccccactcatggtgttccccaaatgccttgggattcacccagggtttaaaagaacagggctactgagtgaaggtcaatagggcatggtttgttatgggttcaggactggggctagatgcaactaccacctgaactagggtgcagttttatttccgttgcttagaactggggattgagccactcagtgtatccccagccttcctttttcctatttattttgaaatagaacttcactgccttgcccagctagccataaagctactctgtagcccagatgggccttgaacttgtgatacactggccccaaccttctgaagtactggagatgtaaatcacctctgccaggcctgactgaacttactttccagcacctggtaaggaatgtggttcacacaagcttgctggctgtgttctggatttatttcagaattcaagtggcaacaatgccttctaacctgtgaccttggtatgtcttgatttatttggatctatattcaatactgccatataagctttctttttctctccaacaagtcttaatatctttgccaaatatattgtgaggttattgatatttcttacagatcatgtgttttattcatattttccaattaaattttctgcagtttctactgcagcatggttctttttgtctcagaagacattcattggaaaagacatctatctatgaagccctattagaattaaaatatataaataatgttctacttagccatccctttcttgagactttgtccaacaggaataaaagcacatgtctttagagatatactcataaaacatatgaatgtttatggctgtattgtttacaagaataaaaatctgagactagagtgactgcccacaaatatggaagcaattgaatacattagacacacaatggaagactctacaaccattagtccgaaatgaattgcagctattacagtggacttgacaagattccaatgaagtaaatctaagccaggtgatggtggtgtacacctttaatcccaacatttaggaggcaaaggcacatggatctatgtgagttcgaggctaacctggtctacagagtgagttccaggacagtcagaactatacagagaaaccctgtcttgaaaagcaaacaaacaaacaaagcaaatctttcatgatgatcttgtggaaatcacacccttgggcatatgtgtatacacacacacatgccattggcaataagaatttagagagagatgtgtatctatataaaatacatttaatgtactaacttgtgagcatggaggaagcatgatgctgaggctgttacagaaatggaaagtgtagctcagacacatcattgttttataggcttttatgtcctgagctggacacttcatcttagtaatactgttttaatgaaaaaaaaaaaaaaagagaatgttcccgaaagctgcaccacagggtattatgagacggtggcacaaataacaaacatcaatgaataattcaaatcatagtcattttttttttttttttactgtagtgggcagtttgtgatttttctcaagggcagggaagtcttcagtcatgttttcacacaaaaccagtttgcatttcctcagcaaagtccagtcccagcaggacaaggaggcagagacacacatacaaggacatacatgcagatgtttgtatgtgtacatgcatgaacaagtgtgcccatgcagaagacacatgcatatgcacacacaacacatgtcataggcacaccgcgtatgttcatatactcagtggatatcaggttttctagggaatctgtcatttggtgggatcagtcttatggctctctctctctctctctctctctctctctctgtctgtctgtctctgtctctgtctctctctgtctctctgtctctctgtctctctctctcggttgtttgagaacagactgacttcgaatttgtgatcctcctgactcagcatcctgagtgtaatgggctgcttcagtcttgagatggggtattgcaggtgaacctgtgtgcttgatctgaacacccttgcctggtgtgtagttagcaaacagcaattgtggatgtgtgcatgggagggattgggtcaagggagatgcttcatgaaggaaaccgctcttagctgcacttggtagacacaccctgttatacaggggaagtgtactcaagaggcctcagggtgtcccgagtgaaggattactttgattcttggcagcgctttagtgaactatgccatccaaaaggctgtggtggttttcagtctgtgttttggcaacactctggttcgttcttcttttccaagaatttgagtgtggctatttttttttttaattgatgcattgttatgcaatacaagagctttctctccgtagttcctctttgtggagtcaatgctcagggacagtcaattgttgatcgtcatgtgacaagcactaccctaggagccagagagtcaaagacaggataggagcagagacctacctctcaaatgatgaccaggcttgtctgtctgtctgtcagtctgtttgtatatgtgcatgtgggagccacattgcctgacatgggcgcagggaactgaacaccagtcctctgcaagagcaacaagtgctcttaattgtcataatcaggatttttttctaagggaaaaaagaacttggtatgtacaaggcagatgtggggtgatgagattactgaaggcttctcagaggaggtgacaagtacgggcttgtcggatggatgggagtacccaggcagctaggaggccccagcaactcttataaaggaaaacatttcattgtggtgactgggttccagctcagaggtttagtccattctcatcatggcaggaagcaaggcaccatgcaggcagacatggtgctagagaaggaggtgagagttcttacatcttgacttacagacaacaggaagtagtctgagacaatgggcatggcttgagcatataagatctcgaagcccactttcacagtgttacttcctccaataaggccatccctattccaacaaagccatacctcctaatagtaacattcacttttggggactattttttcaaaccaccacagccagtaaacatattttgtaggtctgtaagacagtccagaggggtttgccatggtttatactcagcaagaatgggaaatgtttaacttgaattttctgggctgatgatgtatttatcttcacaggtgatactctctgggatcattggattgacaacttggaaaaggcctatgatactcctggtatgtacacatcatatgccattactcttcataaaacataaagcccatgaagtaaactgttgagatcgtaaatgtccttgttcattaaaaaataagttgacagtagatacgttagaagtaaatgttccaataataatgatgatgaacgatgataatcttgatggtttatggtttgcttttaagttctgaattcatctagagttatacatatgtttcttgttccaacattaaattcattttgaagatattattgaaaaaatctgtttagggctaaggagatggcttagtgggaaagccatccttgtacaagcaagaagacctgagttcaaatcctcaacactcacataggagctggtcatggccatgcatacctataactccatcattgacgggtggagataggtggatcctgggcactagatggttggttggattgattagaatggtgagcatcaggttcagttcaaaatataaggtggagaatgatggaagaggacacctgacatcctcctctggtttccacatgcatgtgcacaggtatgcacccctgtcccccaacgaaccccttccccatgtctgttcactatggatacaaaagtggagggaatgatataatgaattcactgtacctattgcccagttctcaccctctccaattctttgttcttctttgtcccaagcaaaccacacatattaacaacaaatatataacgtttcacttttcattgtttgaatagtttggttgaacatctttgtaattttgttcctgagatttgctacattgtctctttagcccacaaatactaattttcttaataatgcagacattaactgatgactttatccttcttttgctgttgtagagctgtaattaatgttccaaaatgaaccattctccagtgtccaatgacaatgcaaatgatctgaatctttgtcctttgtttttacctgttgtgggagtttgattaagaggtaatggtaataagcagataaatagcaatagagtctatgtaactgccaagtccaaaatagagtttaggaaatctgacttgcattgaagagtatttaaaaaacatattacacatggtagcttttcttcttacttttctttcatatctcttgatataaggtttaattatttccagaagccatttttaaaaaattggttagttttatgtgtgtgtgtgtggacaccttggtggtgtcttcaagaactcttgtctctcttgagactgtctctcactgaacctggaactacccaattaggctagagtggctgttcagtgggagccaggaccctcctgtcttgcttcttcagcacctaccattgtgtcagcatttttacttgggttctagtgaccaaacacaggtcctcatgcttatatatcaagcattatcctcactatctttccaaaccccacagtcatatagggtaggttatgggaagccacttacacattcactacttggtaaaacagcgtggtgcagaatagatgggtccccacactgctttgagaatctggaactctaacatgctttcagctcctcaagtagcacaggcaacatttcgtaaccccattatttattgccttgagtgaaacacctttaaaatattgggaggaataacttgtcaggggagcatctaatatgttggaaagtaggacagaagggaaggaggtgttggatgagcccatggctcataagctgaagtatgttttgctgcagctgtttgggattagtctgtgcaggaaaattttggatgggtggtgctctgtgtttgtatttgggtagaggagtgacctttgcggtatcgcttgctgtttggtcaatgttaaaatactcaagtctttcaagtgaatgaagataaaaaaaaaacttccctgataatttgtattctaaaaatcccaaatgatgaaaagaatatgagcatgcatcttaaatagagttcaagaaagcccacacttgaaggcatttattcttgaattgctatcatgtggaaaggtggcttttatattcgttattgagcattaacaagtataggtaaaaatggccttaataaaaataattttccttaacttctttttactctctatttttcatcattgttcaaaaaaatgctatagtttgttgtaaagttgtacccaatttagggatctgggagatgacatgaatatctagtacacacatacaaaagctgggcctggctgtgcatgcctgtaattcaacattgaggacagatgtaggcagatcctatgaactcattggccaggcaaccatgccaaaatgatgattttcctgttaagtgagagtccccagtaaaggcattatagcagagagtaatagaggaagattctactgtccttctctggcttccatgtgcatatacatgagcacatgcgctgacattcacatatatgtaccacacacacaccacacagagaacatacaacatgtataacacccaaaatggttgtaaccagtgtgtatgtattgtcttatgtcctgccttttcagtttactatgaagtagtattagtgatattgtttcttcaggtaccaccattattgccaaacagccatctattgtatttctattgcatcattaattttttatcatatagttgggcatttggacttctatattgtcactgggtcagttagtttttgtcaacttgatgcaagcaagtggcatctggaaagagggaactttaattgacaaaatgtccccatcagattgtcttgtgggcgtgtgtgtgtgtgtgtgtgtgtgtgtgtgtggggcattttcttgattgatgattggtgagggagctcactgtgggtggtgctccccctagggcaggtggtcttgcgtgctatagaaagcaggctgagctagacatgaggagcaaaccagtaagcagtgtcctgtcatggtctctactccaattcctgtctcccaagttcctgtcctgacttctcttggtgatggggtgtgacctgagaggtgtaagctgaaataaatcctcctctcccaagttgtttttggtcagcattttgtcacagaaacaagcaaactaggccagatgtaaaatgttaatcaatattaacttctaataaatgacccttttaggactaggcaagattcagtctgtcagctgatacagtaagtctcagtcaccatgctgcatgaaaaacctggggtttacatgaatcttactaatgtaacactatatacaggtgtggtgatgcatgcttgtagtgccagcacttaggatgcctaggcagaactgtgcagagtgtaaaggcctatctacactgcaaagcaaggccttctctcacataggtaaccagtggctaagagatgacttaatgtttcttaccaagcactcaacttcagttcccagtactcaggtggctcacagctgcctggaatacagctttatggaatctaatctctttttctggcctctgcaggtaacccctcctgccacacacgtatcatacacatgcatgtacccacctatggagatgcacacacatatatgattaaaaaaaataaagccttaaccaaacctctatcaaacaagcaatgggacacacacacacacacacacacacacacacacacacacacacacacacccctactataataacctgcattaaatacattatgttaagaaataaaaatgtgtgcagagaaactggaagtgccatcctcttccgagccatgcagctcttggcctttgtggagcataatttcttctgtacttagggggataatttgggatattaggagtggctttaccaccccctcccttggtgtatattccaaccctcccctctttttttcctccctttctttgttgcctagcctcctcccttgcttcctgagtgctggaatgtgccaagggctaatgttgagacgaggtcttgttccattagagaagtcagcagtgccttttgttgttgatttttccagacagggtctcatatagcctaggctagccttgagcttcatatgtaactgaggctggccttactctctgcatacccctgcctctgagcttcagtgctgggattttaagaatattccagtgcacgtgctagggcagcgttttgcagatctgggctcagctgcccaggtttgtcacctcctggctttagctctcctacacatcttgggcactgtctgccttgggtctttcttccccagcctagtgcttggctgccaccttctcctttggctttccactcatcattcacacctcacagaaggactggctacctcagtgactggttcctgctctccagaactgagtgtagtgacttagccctagaccattggaggcagtctgtttagcctgtagactggctgcttagtgtttctcatttgtctctccaagagagggttaggtgaagacaggtgcctttccagtgccccctccacctctagggtcagttccagttcgatcatatgtttttgtggctatgtggaggttgggcaaggttggaccatgtccagcctcttgtgaggccagctgtcctagttttcagttgtgtccacactagcctggaacacgtgagtgttcctttgtaagaagcagttcttttgtgtaccctcccctgtgatggtctttgtgatgacttcaggttgcttatcagcttgaacaaaggagggtcggtttgccccagttccttcaaactcaggtcttcatgaaaagccagaacttcattcatcaaatcctcttcttatattggaacagtgctcatgtgttctgtacagtaatcacactggaaaataggttttaaatactcttgttactagggccaagcatgtgcctttgtgtggtagtctaggctgaatatttttcacaaaagattaccattttccatgtctaaaatatattatttttgtgctgtttcttcctttctgattttgccaaaaatgttttgtaattgtttaagaatcagactctgttctagaagtggcctccaaaattgtcctgtgcaggtacctcggttagtaaatggaattatcttaattccatgttttctttggtggtgcattaggaagaaccagcactatggaagtccagctgactgctatagttttggttgcgtatgaagtagtaattggaactgttgctactttcttgttggtttggaatagatgggatacatctgaccttcaaactgatgtaagatggtctttaacattacaaatgaaggctcttggcttcaagcctgacaacccgagttagatccccaagattcacatggtagaaagagaaagcgtagacttacaagttgtcctctgacctccacatgcatgctacggcatggcccccattaacaacaacaaacgtgcagacaaataaatgcatgtcttgggttccatatggttattttattgtatttgaaaagtcctcattatgtggcctggaactcaccaagtagtctaatttgccttgaactcacagaaatctgcctgcttccacctcctgagtgttgggattaaagatgtatgccaccatgcctagcaggttccatgtagttgattttcacttgtaggtcccctagattatacctcacaccaacgataagagatggtaatgacagtggctgtttaaaaacaccctaacttcattattatagtggttagaacagaatggcttaaagcatacattcctccctcatttactcaataagttaggctggggagagggctccacaaagccatttgagatccaggggccttttatctgttgtgagaatcatgggaggcttgcatacttgttcagagtggttgatgactgacctccaagacttattagctagaaagagttgtgccatctttcctgatgccgtgaagaattatagttcgagccatcacatgcaagtgagggagatgagtgttgatgctctgaggccctgatgtatgctgcttcattcaaatatgtcctgtggctgtccgtaatttggaatgagccctttttatttcacagtgcgtgaaacctggatttagtgctgacacattaccactaattattaggtaccagtggaatctcttaatttatgtcggtgaaataggtactttaattcagaacaatgttttgagtccttcatactgtattattagagatttccagaactctccctagttattttgatgatattttaatttcagatggacatttcttaagctctctttgtattagttgttattcagtgatcatactataccctgagcccccagtcttgagaaagagcatcatgtatcaggagatgacttgaggactttaaacttctcatcttcctgccttcactttctaggtactgtgatgtaacataaataatataaacccaatgacagatattggagtttaagcccaaagaccagagaagcaaagcaggcaggccccactagctcttaacctctacctcagactgaaatgggttggttctgtctccacgaatcctcagagtgtgcacctctccaccaaacctcagacttcaatcctctgagctcctgtctccttccaccttatactcctctttccacccagccagatcactcctgtctccacctgcctagtgctgggattaaaggtgtgtgattccaagtgtgtgaggtcacctttgtgtgagctgtttcaagtggctttgaactaacagagatccatggtctgcctctgtctccagagtcctgggattaaaggtgtgtnnnnnnnnnnnnnnnnnnnnnnnnnnnnnnnnnnnnnnnnnnnnnnnnnnnnnnnnnnnnnnnnnnnnnnnnnnnnnnnnnnnnnnnnnnnnnnnnnnnnnnnnnnnnnnnnnnnnnnnnnnnnnnnnnnnnnnnnnnnnnnnnnnnnnnnnnnnnnnnnnnnnnnnnnnnnnnnnnnnnnnnnnnnnnnnnnnnnnnnnnnnnnnnnnnnnnnnnnnnnnnnnnnnnnnnnnnnnnnnnnnnnnnnnnnnnnnnnnnnnnnnnnnnnnnnnnnnnnnnnnnnnnnnnnnnnnnnnnnnnnnnnnnnnnnnnnnnnnnnnnnnnnnnnnnnnnnnnnnnnnnnnnnnnnnnnnnnnnnnnnnnnnnnnnnnnnnnnnnnnnnnnnnnnnnnnnnnnnnnnnnnnnnnnnnnnnnnnnnnnnnnnnnnnnnnnnnnnnnnnnnnnnnnnnnnnnnnnnnnnnnnnnnnnnnnnnnnnnnnnnnnnnnnnnnnnnnnnnnnnnnnnnnnnnnnnnnnnnnnnnnnnnnnnnnnnnnnnnnnnnnnnnnnnnnnnnnnnnnnnnnnnnnnnnnnnnnnnnnnnnnnnnnnnnnnnnnnnnnnnnnnnnnnnnnnnnnnnnnntgtggtgggggagggtctgggagaagagaagggaagggaaactgaggtgaggatgtactatatgagagaataataataatagtaaaataagaatttaccaggttctctgggatacagaggctcatgatatgtcgctctggtttgtagaaaaggaagcagtggctcagggactgactggcttgtccacttcccagttagatgttcccagtcacatgacacattatcagaaagaacctccatgttctggtcctactttgatgttcttcccattgtcccgtttcacagtctccttggttagaaaaatggtggacacctccccggggctgacagtggcttatttggggcacgaaatctaaattaaataagttgttttcttacccttgcctatacaattccttttaagtgtgggactgacagaaactttggggattttatccttcaccttaaagagccagataacaataacaaagacagcacaaggttcacttttgcatctcaaacctgttattttcaatgagttagtggcccaggaaatggtggactcagccccctcatttgtacaatgggactataactgcccctcaggaagaaaaggtctaaatgcacattgaaactgaaatgacaaatgagtgcaggtcaagcatattatgtattaaaaaaaaatcatcactgaggacgcctccaagagaatctggcctcttgctttgctgtgttactacagacactcttaggcctggtcgaggcaccagggttcaggcacattggcagcagagctttgattttcttctctgatcacccctgggaactgtgcctggggaagatcctaggttctcagaaagaaagatccctgcagtcactctctgggtggaatctagatccaggcagtgccctgctttgcaaagtgacctaagcctgtgtggctgtattctaatgcttatggagggtctgatatcaccaggtcattactggagcttagaggtgacctctctgctaagccaatgaaaggaagtcttccatcaaattctactataaataccagtgtgcattagctagcagaccaaaaattaatcacacacccgtagacacatagagctaagatttgatgccagcctcgtggaacggggagcacaagaagccttgctgcagccacttgtcacttgtcttggacaccacagttggttctctgagagcccattgatcaaacgcattaagctttgtctcttcattccacttcagaagaagaaatgcttccttgccagcagatgtcagaaaggacaagggaacagggggctatctttagggttctagctagggctctggctgggcaatttgaagatgaagtttacaagacaaggtttgggattgttccgaatctggatgtgtcagaagagctgtgggctgctcagactgagaagggtccagatgtagagcttggcatgtcatctctaagtcatggtgcatacatggataattggtgtatagtcttgcttgtgaggaaggagtattacccagggagagcagctaaattatttttgttgtttttagtaatgtttgaaatattgtcagaaatggatagcctgacccagaactgatcagtttaggggctggaattgagatgtagctcaatggtggaatgtctgaagtcagagttggctgactcggggacaggaacttatgtggctttagttctctatacaggcttcactgagaacaagttgggacttcttttatgttaaataagctggtgatttgactagccacctcatttttcacatttgctgctctcttttagccaagatacctaatgttgttggaaggtaacatataggtaggcttctagagtttggcttttctggtaagtgctgactgatggtcctggaatgtgagttcctgactgtccttaggtgcatctggacctgccagtatatacataaaaccatacggccagtgttggagcatgacagtcagtctagtgctgggcagtgccaaaggaaggcctctttcccagtcgaatgtcctggctttgtagggtctcgtggactgtcattactcctgaaatgactttgaggaaactgcagcttctgagtgacttggggcaagaagagaaacctgggttggaggatatcttaacataggtcatgggtctgtgaggagtgatacataacagggagagcgccattgtgtaggctttctccttctaaaacaagtgacccaccccactgtgttgctctgacaaatgcagcataaggagggaggggcttattttggttcacatttccagggtacagtttatttcgttgaggacatgatggctgcaggagcttgagtgaggcagctggttcccttttgtctgctgtcaggaagcagccatagggaaggccccttgcatttagatgaggtcttcctatctcaatacacttagtctagaggatgcctcacaggaatgcctagaagccgcctccttggggattctaggtcttatcgagttgatagtgttaaccacttggggaatcgggttgaatgcttgcattttcactgacattttctggaaagattttcaggaaactggttgggacggaatgaggaggacttactttctgagttatgttggagacagtgtgagagaaggctgctatacagaattatactttgtttagtccttggctgctcagtgtcttcagcatcctagacttggtgtctccacgttagtgagtcccgtgagaagcagaaccatctcctccagcagtggaggctccaaggccacacgctttcccttctgagcatcggcatctgtgggtgaggctgcatccctgctgtctgtctgttggaatgcatgttggggtgtccacgagtagtatcaagagcactttagaatccatgaggggagggctgcaggagtgccaaggctggtgccaaagggcctggttttcctgcatgaccttgatagaggtcccagcgttcagtatccttggctccgtctcaggttcctgtggattttgtgagctacctgatagtcttacaagaaatgccttctctcattaagaagctgaattagcttctcttgttaggaacataattaagaactctggctgtatatggcagtgatttttctctcctcctgagtttaatgttaactttattatacattgtaaggttcaaatgcaaatccgttttaaagtacaaggcattcatggtaattctgagtatcaggaggtgcaggggtgctgatcttggtcgtatcatgtgggtgcctggcttaggtaggataggctggataagcagtgtaagtgctcaggtggtcgtggcaagagtttgtaccatgagaatgccccagaaggcctgttagacccctttagtgatgagaaagggttgtgtgtattagtcggtattcctcatgctattggaggatccagatctgtactgtgtcccctaattagttgtgaaattctgggcatcatagactacctctttgagactaagtcgcatatacttgccttctatttctgtctataaatattttatctgtctgtatttcaaacacacccatgtgacagttgtataatttacaaaatgcctgttaaacagaggatgcaatgcttaatcttcactgtcaacttaactgggcttagaatcacacagaagactaaggtacacttttggatgtctatgagagtatttccagaggactaatgaagggggaaaccttaattaaacctaaatgtgggtggcaccaacctgatacaagctagagtcatctgggcagagggaatctcaactgagaaaatgcctcaaattggcctgtaggcaggtcggggggggggaggtattttcttaattaattattgatgtaagagggtccaggcaaccatgggcactgatacctctgggcagttgttcctggatggtgtaagaaagataactgaaagtgagccagagagcaccagtgagcaatgttcctcatagtctctgttttagttcctgcctctaggtccctctttgattcttttttttccttccttttattgaagatagatttttcttacataatatagcctgattatggtttcccctgtttctactcctcctgcctcttcttccctacctctttccccatccagatccactccctttctgtttctcagtgggaaacaaacaggcttcttttcttttctttttttggttttccaagacagggtttctctgtggctttgcaggccatcctggaactagctcttatagaccaggctggtctcgaactcacagagatccacctgcctctgcctcccgagtgctgggacgaaaggcatgcaccaccaatgcccggcaaacagacttcttatgaggtataataataaaataaaacaaaagctaacacatcaaaattggacaaaacaaacataaggaaaagagcccaagagaaggcacaagaatcagagacccactcattcacatactcagaagtcccataaaaacactaaactggaagtcataatatatacacagaggacctggggcagacctgtgcacactaccccagtctctgtgagttcctatgagcttggatcatgttggtttagcaggccttgtttggttggtgtccaccatcacctctggctcttacattcttcctgcctccacttctgtggggtttcccgagccctgagaggatttgatggtaacatcccttttaggactgagtgctcccaggtctctcactctctgcataatgtctggctgtgggtctctatttttccccatcaattataggaggaagcttctttaacgatggctgaacaaggctattaggatagaagaatgtcaccaggagtcattttattgctatttatttccctattttttagaacagtagtatttgattttaccctacatccctgggatatctagtcttaggttgttggttgcacaagctgtgtggggtatggattccattttgtggaaccctaagtcaaatttgataattggtttcttatacaaactttggccaccattgcactagtgtatcttggagatgggaacgtcattttagatcaaaatgtttgtggctggtttggtgttttcatttttcttttggtgctgtgcagagtactttgttgtacagaaaacacgagaacatgggtgaagagtctatatagtcaccagctctactttcccaacgtaagctgtgtaggtgtaggtgttgtctttagcattgggaccttgctgtcagtgtgtggggaacaacctatagtcctggcaacagtctgggttgtttggagatcctcatgggacccctttggccaacaactcaattagatgcaattctggtactgaaagcttcatttggtgacaagagatggccatttgggggtctgtctccctcattacctggctatttcagttagatcacctttataattatatatattttgattatactacatgatgttttcatactataccccaaatgtctcttaatttttagttgtctctccctgtattccctccccaccccctttcctctactcttcctcacttgatgctcccattccagccaccccactcgttcttcctaacaagatctctccatccccactagtcccttactttatacctaacctatgtggttatatagattgtagctttgctatcattgacttaaaaactactatctacatatatgtgaacacatatcatatttgtctttctgggtctcagacactcaggatgatttttttccttagttccatccatttacctgcaaatttcatgattttattttttttaatggctgagtaataaatgcttcattgtgtaaatgtaccacatttcctttgtccattcttctgctgagggccatctaagttgtttccaatttctggcttttatgaatagagcagcaatgaacatggttgagaaagtgtctgtgtggtaggatgaagtaacattcagatacatgcccaaggtagattgattcctatctttatgaggaactgccatattgatttccgtagtggctgtacaagtttgcactcccaccagcaaaggatgagtgttccccttactccacatccttgccagcatgagctgtcactttttaaaattgattctgacaggtgaaggacaaaatttcaaagtagttttgatttccatttctgagatgggtgaggatgttgagcatttccttacatgtttctcagccattagagtttcctctttagagaattctgtgtagatctttaccccattttttataacttaaatttattcatgtcttttatatgccaacctcagtttcccctctttcctctcctctcattcccttcccccaacccattcctcctctgtttctgttcagaaaggggacaggcttcctgtgggtgtcaacaaagcatggcatatcaagttaaggtatgactaagcccttccccctgttttaaggccaggcaaggcaacccagtatgaggaataggttcctggaagccagccaaatcattagagacaggacctgctcccaccactaggagtcccacaagtagaccaagctacacaactgttcctcatatgtaaagggcctagactggtcccatacaggctccctagatgtcagacaagactctgtgagctcctatgtgcccaggttagttgtttctgtgggttctcttgtgatgtctttgactcccctggcttcttcctccctctttttagcaggactccctgagtttggcccaatgcttggctattggtctgcatctttttctatcagttgctggagaaaacctctctgatgacagttgtgatagtagaattttggtaggcattattacactgacttttttttctcagtcatgtttggttctatcctaggtttcttggataagcactccaggcagtaacagggggtgggcttattcttgtgtatgcgtttgttgctggaccagttattggttgcctagtctcacaatctctgtgtccccattacctaccctcccaccttgtgtggctaggcccaattcctctactggaaatctgtcctggtcataggagatggcaagttcaggctatgtatccaccattgctaggagtcttagctggggtcatttttgtggattcctgggagtttccctagcaccaggtttctacctgatcccaaaatgccttccccaacccagcttccgtttatctctttaagtacttcccccttccacccacccccagagcagatccctcatggtcccatctccacccaccccaagtccacccatgagatctcttctgttttctcatccccaggagatctgtttgtcccttcttgggttctccttgttacctaacctctctgggtccttggattgtagcatggttatcatttactgtatagctgatatccacttataagtgagtacatttcattttgtctttctggatctgggttgcctcactcaggatgattgttttctattttcatacatttaccttcaaatttcctaatgtcattgttcttaatagctgagtaatactccattaaataaatttactaagtttctttatccagtcttcagttgagagacagctaggttatttccaggttatggttattacaaataaagctgctatgaacatagttgagccagtgtccttgtggtatgattgaaatcctttgggtatatgccccaaagtggtatagctgggtcttgaggtagaacaattcccagttttctgagaaactgccatattgatttctaaaatggctgtacaattttgcactcctaccagcagtggaggagtgttatctttgctccacatcctctccagcataagtaatcatttatgtttttgattttagtcattctgacaggtgtaagatgtaatgtcagaattgttttgattagcatttcctgatggctaaggacgttgaacatatctttgtgtgtatcttgatcatttacaattcttctgttgagaattttctgtttagatttgtaccccattttaaaattggattatttggctttttgttatctagtttctggagttctttgtatattttggagattagctctctgttggatgtggggttggtgaagatctttttccattctataggctgccattttgtcctactgacaatgtcctttgccttatagaagctttttagtttcataaggtcccacttattaattgttgatctcagtgtctgtgctactgatattatatttagaaagtggtctcctgtgccaatgtgttcaaggctatttctcatttttcttctatcagattcagtgtaactgggttatgttgaggtttttgatccacttggacttgagttttatgcagggtgatagatatggatctatttgcattcatctatatgtcaacatccagttatgccagcaccatttgttgaagatgctttctttttttcattgcataattttgacttatttgtcaaaaagcaagtgtccataggtttatggatttacatcaaggtctttgagaacaatacaaagaatcaatgaaacaaagagttggttctttgagaaaatcaacaatatacacaaacctttatctaaactaactaaaggcagagaaagcctatccaaattaacaaatccagaaatgaaaagtggccatagaaacacacactgaggaaatctagagaatcattaggttatacttaaaaaacccgtactccacaaattggaaaatctaaaagtaattaacaacattttttaatgaataccagataccaaaattaaatcaagaccaaataggcaatttaaatagacctataacctctaaggaaatagaaaaagttattgaaagtctcctaacccccccccccaaaaaaaaagaaagtccaggaccagattgttttagcgaagaattctaccagaccttcaaaaaggaactaataccaatattcctctagttgttccacaaaatagaaacagaagaaatgttgccaaaattctttttatgaggccacagtcatcctgatactcaaaccacacaaacactcaacaaagagaattgcagaccattttctctcatgaacatttatgcaaaaatactcaataaaatatttaaaaactgaattcaaggaatctaagatcacatcaaaaagttcatccaccacaatcaagtaggcttcattccagagatgcagagatagttcatcttatgaaaatctgtcaatgtaatccatcatataagcaaactgaaagggaaaaaaacccacatgatcatctcattagatgctgaaaaagcctttgacaaaatccagcaccccttcatgttaaaagtcttggtaatatcagggatacaaagaatatacttacacataataaaagcaatatacagcaagccagcagcaaatatcaaattaaatggacagaaactcaaagcaattctactaaagtcaggaacaagacaaggctgtccagtctctccatatctacttaacatagtaccagaagttctagctagagcaataagacaacaaaaggagatcaaggggatacaaattgggaaggaaaaagtcaaagtatcactgtttttagatgacatgatagtatacacaagagatcccacaattctaccaaggaattcctacacctgttaaacactttcattgaggtggctggatacaagattaacaacaacaacaacaaaaacccaccactaccaacaaagaagctccccaaaacagtagccttcttatatacaattgataaacaagccaagaaagaaatcagggaagcaacacccttcaacaatacccacagataatataaactatcttgggggtaactctaaccaagcaagtaaacaacctgtatgacaagagcttcaagtctttgaagaaagaaattggagaagatatgagaagatggaaagatcttccatgctcttgaattggtaggattaacatagtaaaaatggcaatcttaccaaaagcaatctacagattcaatgcaatctcatcaaaatcccaacaattttttacagacctaaaagaaccatgctcaccttcatatggaaaaacaaaaaaacccaggacagctaaaacaatcccatataatctgtacaataaaaggacttccagaggtatcagcatccctgattttaccccatttttaaattgtgttgtttattttcttggtagttagttttttgagttctttatgtattttggatcttagccctctattggatatgtatctggtaaaaatattttcccattctgtagtctaccactttgtccaaatgatggtatctatttcttcttcttcttcttcttcttcttcttcttcttcttcttcttcttcttcttcttcttcttcttcttcttcttcttcttcttctcgtgctcattctcgttctccttctcattctccttctcctccttctcctccttctcctcctcctcttccttcttctcttcctcctcctttttcatcttcttcctggtacttgcttcgtagaccaagctggttttgaactcatagaatccacctgcccctggatcctgaatgctgggattaaaggcatgcatcaccgccatcccacttgctttcagttttatgaggtcccagttatgaattgttgatcttagtgactgtgccaatgttgttctgttcagaaaatcttttcctgtgtaaatcagtttaaggctattgcttactttcctttctatcagattcagcatatttggtctttatattgaggcctttgatccatttggagttgagttttgtataggttggtaaaatggatctatttggattcttctacatgcagctgtctagtttaaccagcaccatttgttaaagatgcttttccccccagtgtgtatttatggcttaaaaaaaatctttcttctctctcctctattcctgttattcttattcttatatttggtcgttcattgtgtcctggatttcatacatattttgtgcctggatttttttttaagatttttccttgactgaggtattcatttcttctatcttgtcttcaattatttctttcatctctcatattctgttggtgagatttgcctctgaggttcttgttcgagttcctaaagttttcatttccagattccactcagcttgagttttctttattgattctatttctactttttggtcttgaactgtcttattaattttctttcattgtttgtttatattttcacaggcttctttaagggattatttcctctttaaggaactgtatcatattcataaagaccattttattttatttttttgtgatttagctatgttgcaatactcagggtctgctgaggtaaagattgctgggctctcctggagtcatattgtcctggctgttattgattgtgtttttacactgacgtttaggcatttgtgcctgggaaaatcgtaattctaggtgctgatatctggtcttgtctttgttgggtggatgtttgattccttggtttgtgttgtcttctctggttcttagaagactgttggttgtgtggtaactggtaggaaattcttttgggatcctggtaggtgtggccactcagggttccaggtaaaatgtgtttctatgtattgggagctgacacttaggaatgggaatgggctaggaaggaggggcctgagtgggtccacaggtgggaggaaggcaagatattctaccaggatctgcttattcccctgggaatgaggtcagagaagagggggctgcagcaggtggtctgctacagagctggggatgagactggggacttaaagaggcaaatgtttctgagaaagttactggattttggtggcattatgagctccccatccccccagggggtacttagagataagcacttggagacctgatatgggttccttggtgttcgactgtgccagaattgtgcctaaaaaggctggttggaatgccctgtggtcttagttgggaaacagctatgtattcacagcccaggctctaacaaaatgcttttagctggctggctggactgtaggagagtgctggcctggagtgagggccctggaggagtggagagatcacaggagcagtggggcttgcattgcagagacaggaactgtggctctgcagtaggggtcccagaggagccagtggaggctttgttggtggagatcttcagacatgctaaatgtatgatgatcattagatgattaataactaggcattatcagtcacagcaggctgggaagtagacacaaaacatagaaagtaggacattgtagttgccccttgcctttcccattcagccatgcttatttcccacagtaatgagcctagtgctggggagaaaagccaaaattcaaatgaaattcccagctttcactaggacacaaacatgggcatgttaaggactgaatttcaattatggcttgaagagatcagagcacatttttcatcttatactggaagagaggtcaagggcctagccttggattccatctaaaaagtgagtgaggagtggtaaagcccacagaaccgccaccaccaacactggaaaagaacaggtgacctatttctctcaagtcccacttgtacacattgtttcctgtgaccaggagcatgacaggcagagggcaggagatgcaaacccatgtcactcaggcgagcagtgttttcagcagccaagccaaaacatatattttgtctattctttactcagtagatgtcgtattttcattggcttctgtcttctgtcttgggccacgacttttctgtttgctctgttaaaaacaccatgaccaaaggcaactaaaggaaaagagtttgtttcagcttatggttcctgagagataagagtccattcatagcagagtacaatggccgcaagcagccagcatggccacaggaacaagtagctgagctggaagtgtggtcagcctataaactctcaaaggccatcccaagtgatgcactttctccagcaaggctgcacttcctgaagactctacagtctctgcaaatgataccgccaaacaggagctgaagtacctgaacccgtgggggtgcatttctcattcaaagaaccacagttttgatgcctacctttctgttcccttgatgtttctaattaccctttgctttcttgtgtgaacaaaaacaaatgcctcacctcagatattatggtcctactacgtgtggattcactatgttataattgacatatgtaaattttacttgtctaaagaacacaagtggtctgtgcaggcatacacacatgtcactgtcatcagtttgctgtcacctccgtaaaggaaccctgtgtctcttcccattttcctgtcatacctcagtcctatgaaaccactaattctctttctgtctctagatttgcttactatggatatttcaagtaaaaataatcacatcatgaaagattgtttttgactgtcggctttcatttggcaactttttagcatgacactttgaaggtgtatctgttctaacatgcgttagtattttttcctttttactaccgatgaatattccattgtatggttataatgtattttgttcatttcatcactggttgatgaatatgcatttctactttgggctcttgtgggtaaaatggtttggatatgaggcacttcttaaaatggcttgtgcctgggggtttggcttctcagcagggagaggttctggaaactttaggagaagtgagtcacgcggtgtgtgtctttagaggatgcatcttgtgccatcccttctctcctggctcttgtctgctgtgataggagcagcctctgtcacatgcgtctgcagccatactgttctttctcactgttgactcagaatcagccgagccttggagtgtagaccagcatctctgaaactcagccttatgacctccaccacctttgtgccaggcattttggcatagcaatgtaaaagcaacacaaccccactgtgatcagtagtgtatgctgtttttattttctttgttgacagatcctcatgcagctaaggctggctcaaactctgtgtgtagctgaaggcaaggcaaccttgaccatttttttttaaaagcatgttttcagtcctctgaaccacggggcatagagtgaacttctgtgttgtgtggcaactccatgctaatttttggagaatctgctaacatgggtcccttttatatcagcatatccttcactgtctgtctgtctttttgatcctagacatctttcctttacagtgtgagctgatatttcattttttaaagattttatttatttatttattatgtatacaatgttctgcttacacatttgcctgcttgttagaagagggaagagggcaccagatctcattacagatggttgtgagccaccatgttgctgggaattgaactcatgacctctggaagagcagccagtgctcttaacctctgagccatctctccagccccgacatttcatttttaagcaacatttcatttgccactcgtatgttttggggggaaatacttgttcacattccttacttaaaaactggattattttccctttttgtgacatcatcaggtttacaaacaatttttctgcatctacaggttgtcatttaattttcgtggtgatgacgttctaagaacagaaggtttcttaattgtaatgaagcttagtttatccatttttaattttgttccctgtattggcagtcctaagaagttcttctgttggccgaagtcatgaaggcttacttctgttgaaaacatttttacttttgtgtgtatgccttcatgagttcatgtgtgccatgtgagtgctgtgtaggtcagagagttggatctcctggagctggagttacagttggctgtgagctgccaaatgtaggttctggaaaccaaacccaggacctctgtaagagcagtaagcactcttcatctctgagccatctatctcccaatccccttctgtgtttttaaaattagagctttatgtgagatgagtgtttgttctcagtcactgactccacccccccccctttaatctggaatgcgaacccagccattgggttggagatgtctactttggggatgatcctccttctcctcaggtaatccttttggaagtgctccaaccaacacacctagagatgtgtcttctaggttatcctcaccccagtctatttgacagtaaagatttagccattacatctattgaattatccttgagcatttgttcggatctctcagctctggactagagatgtatctccatgggtaagtgacttcctagcatgcactaggccctgggtttgatttccagcatcatcataacctgggcatggtggtgcatgcctgtgattccagcattagacaggtggaggcaggaggatcagaagttcgaggaggatacatagtgagtttaggcgagcatgggttataggagaccacgactctctgtctagacactctaagtgtgaggtttatgtagctagtttcttgatcacacttttcttctaagttacttttcccatatatgtttcttcctgagaacatcaactttttgttctagtttgaacttagctgttttccaggcaaccgtgtagatggcatgtatgtcttttctttatgttcttaagtggcaggcattgtttctcagttattaggtattattacttgttttctgaattcccttttcattttgccagagaacatcctcaaataataatgtttagaaagtagtgatgggaagagaatccactcagggcgtgagtatttggtatctttgcttatcccttctacttgagtgatgtttgggtggctatagaaccttgcattcaaaataacctctgacccaaactttggagtcattgctgatccccctcactcttaggttttttaaacttggtgttaagctacttcttaatcctcagtagtcagttagtctgtcagtccctcaaaagaagttcttagagcctttctctatcttgatatcagtatttaattttcagaaagataaaaatcatgacttctaagaaaataaaatgagcaggaattattagtgaggaaaccctagtgttcaaagatcctctgagaaagtaagtgttcacatcaaccttaagggaaggtggtggggtaagcagacaattggttaatgaatagaactatttattacctttgagattttctgatgcacaggacagaagttgtttttgtttctactgaaatgaaacctaaaatgtaaacttctctcagaggcctaaagtaggcaattgagtgagcatggatactacttaacagctttttttttccctctggatttgaagtgtctgacaaacctgtgaggttgcaaaggtatgccctggtgagtgtgatctctccttcaacccttagaatagtagtcattgatctcttttagtaaaaactaagaatcatgtgacctgaagagaaaccagagtggcagtgaacttttaatttgaagatgtatctttttttaaggactgatttttttcactattttcatgattatttccttctctgctcaatatattttccttctttcctttttttcccttttgtttgtttttcaaggtagggtttctctgtatagctttggctgtcttggaactcactctggcctcaaaatcagaaatccgcctgcctctgcctctcaagttctgagattaaaagtgatgcacaaccaccacccggctgctctttcttttcttgaatatgaaataatcaaatggcccagtataaactagggcctcttcaattctttctttttaattttttttcttaatttttcaaaatttcagttttaattatttatgttnnnnnnnnnnnnnnnnnnnnnnnnnnnnnnnnnnnnnnnnnnnnnnnnnnnnnnnnnnnnnnnnnnnnnnnnnnnnnnnnnnnnnnnnnnnnnnnnnnnnnnnnnnnnnnnnnnnnnnnnnnnnnnnnnnnnnnnnnnnnnnnnnnnnnnnnnnnnnnnnnnnnnnnnnnnnnnnnnnnnnnnnnnnnnnnnnnnnnnnnnnnnnnnnnnnnnnnnnnnnnnnnnnnnnnnnnnnnnnnnnnnnnnnnnnnnnnnnnnnnnnnnnnnnnnnnnnnnnnnnnnnnnnnnnnnnnnnnnnnnnnnnnnnnnnnnnnnnnnnnnnnnnnnnnnnnnnnnnnnnnnnnnnnnnnnnnnnnnnnnnnnnnnnnnnnnnnnnnnnnnnnnnnnnnnnnnnnnnnnnnnnnnnnnnnnnnnnnnnnnnnnnnnnnnnnnnnnnnnnnnnnnnnnnnnnnnnnnnnnnnnnnnnnnnnnnnnnnnnnnnnnnnnnnnnnnnnnnnnnnnnnnnnnnnnnnnnnnnnnnnnnnnnnnnnnnnnnnnnnnnnnnnnnnnnnnnnnnnnnnnnnnnnnnnnnnnnnnnnnnnnnnnnnnnnnnnnnnnnnnnnnnnnnnnnnnnnnnnnnnnnnnnnnnnnnnnnnnnnnnnnnnnnnnnnnnnnnnnnnnnnnnnnnnnnnnnnnnnnnnnnnnnnnnnnnnnnnnnnnnnnnnnnnnnnnnnnnnnnnnnnnnnnnnnnnnnnnnnnnnnnnnnnnnnnnnnnnnnnnnnnnnnnnnnnnnnnnnnnnnnnnnnnnnnnnnnnnnnnnnnnnnnnnnnnnnnnnnnnnnnnnnnnnnnnnnnnnnnnnnnnnnnnnnnnnnnnnnnnnnnnnnnnnnnnnnnnnnnnnnnnnnnnnnnnnnnnnnnnnnnnnnnnnnnnnnnnnnnnnnnnnnnnnnnnnnnnnnnnnnnnnnnnnnnnnnnnnnnnnnnnnnnnnnnnnnnnnnnnnnnnnnnnnnnnnnnnnnnnnnnnnnnnnnnnnnnnnnnnnnnnnnnnnnnnnnnnnnnnnnnnnnnnnnnnnnnnnnnnnnnnnnnnnnnnnnnnnnnnnnnnnnnnnnnnnnnnnnnnnnnnnnnnnnnnnnnnnnnnnnnnnnnnnnnnnnnnnnnnnnnnnnnnnnnnnnnnnnnnnnnnnnnnnnnnnnnnnnnnnnnnnnnnnnnnnnnnnnnnnnnnnnnnnnnnnnnnnnnnnnnnnnnnnnnnnnnnnnnnnnnnnnnnnnnnnnnnnnnnnnnnnnnnnnnnnnnnnnnnnnnnnnnnnnnnnnnnnnnnnnnnnnnnnnnnnnnnnnnnnnnnnnnnnnnnnnnnnnnnnnnnnnnnnnnnnnnnnnnnnnnnnnnnnnnnnnnnnnnnnnnnnnnnnnnnnnnnnnnnnnnnnnnnnnnnnnnnnnnnnnnnnnnnnnnnnnnnnnnnnnnnnnnnnnnnnnnnnnnnnnnnnnnnnnnnnnnnnnnnnnnnnnnnnnnnnnnnnnnnnnnnnnnnnnnnnnnnnnnnnnnnnnnnnnnnnnnnnnnnnnnnnnnnnnnnnnnnnnnnnnnnnnnnnnnnnnnnnnnnnnnnnnnnnnnnnnnnnnnnnnnnnnnnnnnnnnnnnnnnnnnnnnnnnnnnnnnnnnnnnnnnnnnnnnnnnnnnnnnnnnnnnnnnnnnnnnnnnnnnnnnnnnnnnnnnnnnnnnnnnnnnnnnnnnnnnnnnnnnnnnnnnnnnnnnnnnnnnnnnnnnnnnnnnnnnnnnnnnnnnnnnnnnnnnnnnnnnnnnnnnnnnnnnnnnnnnnnnnnnnnnnnnnnnnnnnnnnnnnnnnnnnnnnnnnnnnnnnnnnnnnnnnnnnnnnnnnnnnnnnnnnnnnnnnnnnnnnnnnnnnnnnnnnnnnnnnnnnnnnnnnnnnnnnnnnnnnnnnnnnnnnnnnnnnnnnnnnnnnnnnnnnnnnnnnnnnnnnnnnnnnnnnnnnnnnnnnnnnnnnnnnnnnnnnnnnnnnnnnnnnnnnnnnnnnnnnnnnnnnnnnnnnnnnnnnnnnnnnnnnnnnnnnnnnnnnnnnnnnnnnnnnnnnnnnnnnnnnnnnnnnnnnnnnnnnnnnnnnnnnnnnnnnnnnnnnnnnnnnnnnnnnnnnnnnnnnnnnnnnnnnnnnnnnnnnnnnnnnnnnnnnnnnnnnnnnnnnnnnnnnnnnnnnnnnnnnnnnnnnnnnnnnnnnnnnnnnnnnnnnnnnnnnnnnnnnnnnnnnnnnnnnnnnnnnnnnnnnnnnnnnnnnnnnnnnnnnnnnnnnnnnnnnnnnnnnnnnnnnnnnnnnnnnnnnnnnnnnnnnnnnnnnnnnnnnnnnnnnnnnnnnnnnnnnnnnnnnnnnnnnnnnnnnnnnnnnnnnnnnnnnnnnnnnnnnnnnnnnnnnnnnnnnnnnnnnnnnnnnnnnnnnnnnnnnnnnnnnnnnnnnnnnnnnntctgcaactgggttccagagtttagttcagtgtttagctgtgggtgtctgcctctgcttccatcagctactggatgagggctcttggatggcatataaggtagtcatcagcctcattataggggaagggcattaagggtagcctctccaccattgcctagtttgatttaggtaccacattttctttatccattcttcggttgaggggcatctaggttgcttccaggttctggctattacaaataacgctgctatgagcatagttgaacaggtgttcttgtggtatgaatgtgcatcctttgggtatatgcctaagagtggaattgttggatcttgcggtagactgagccccattttcctgaggaactgccatactgatttccaaagtggccttacaagtttgcattcccaccagcaatggagggagtgttctcctttctccacatcctcttcagcacaaactgtcactggtattttttatttttgtcattctgacaggtataattactttttttaattggagccaatgagcatccttgggttgcatctgactgatgtttctccacatttggtgcagtctataaccctctcctcttgtttttatctgatgaagaaactatatatatatacatatatatatatatatgtatatatatatatatactattttagttatactgcatctcattgtgggtttgccatgttctcctctgtctcttttactgtaactggctgttaagtctataggcttggcctggctcaggttgcattctggagacaaaccaccccctcagtgatgattcatgctgtcaccagtaagcacgcattgtctgctgtctcccttcttgtaatatggttgccactgatgacatttggacaacttgaataacttcactcttttatgtttaaaaccatgagtaaatgagtcacaagtagaagtccttggaccgttgatcccaccctgggtccttgaagtccttccatcctctggtttgtcagatgcttgtctttggaaagggcctgcatctacataaggaagccaccacacactgcaagttgttcttggtgctttgtagtttacctgaacactagaacagttctcctgtgaaatgcttattgtttcagtaatatttattcccctctttctctactggcttacctgttaaaccctcccagaaaaccagtaaccaatgggaacatttggggagtaatcagtcactatgtgatcagttttattgagtacatgttttatggcagctgtggttttaggctcccgggtacaagtggactccttagattttattgtttcttttctagtgttagaacgttttagatgtcacaggacatccctgactacctgatcaatgcaagctgattggttactggagtatatacaatattgtctgcctatttttctttttttctcactttctccttctctccctttcttcctcagttttttcatgttctagaactttacatatatgaagcacaaatcatatgtgttttcacttacgtgtgtatttctgagatcacccgtgttgccacatatatcagtggcttgttcctgatcatctgagcttgattctattggagactccttgtggaattattgagtcacagctgtatttaaaggccaataatgacatgcttgttttagtttataatgccttcctcaatagtctcaaatcagttttaatttcaaacttcctttcatttccagagggatctcatggctgcccatttctgagtctttgggcattctgatgagtaaatcttttcatttttatcttttcctttgtgggtattgcacaatccacttccttgggactcctgagtcaattctaccttccaaatctttgtgttttccccgttattggtcttttaaatttctgcactcaaagatttcactttaatgctgtttttgtgttttttttttcagtaactactatgctaaactacttgctgagagataactcaacagttaagagcacttgctgcttttgcagaggaccagggttggtctcctagcactaacatggcccctcacaaaccctctgtaacttcagtcccaggagatctgatgccctcttctggcatctgtggacactgcacacacacagtgtacacacacacacacacacacacacacacacacacacacacacacacacgtgcaggaaaacactcaaacatattgaatgaaaataaaatgtctaaattcattttaaataataatcacttttaagctgatgccttcctttagcacctgaagctatttatcatttagacacacacaggaaattcaagtccctgaacttggagtagtatggaagtaaggaaaaatataggcaggagggaaagttctgcctatctttagaatgaaatttagagccacttaataccaagctatggtgaacataagtatttaatgaagctgtgtgttgggattatggaaaatattcaggtagaaggaataggcaaacccagggctaggcttctgggttgccacaggctctgccaatattctttttttggggggccacgtaattaagacctagattaaaatggcatctcaattgcaagagatctgagttgaggtgaagttttaataccaaatcaaaacagtaataccttttggatgaaagcatttgatacaagtattcataaaatacaatgtacattagtaggcacacatgaaaggctccctctaggagagaggactctctccctaggaggattctctcctaggaggactctctgattagtaagcacacgtgaaaggctctccctaggaggactctctctctggattttggattgcatattttatccttaaagacctcagggtgatattttgcctctccctacagctcaccctctaagataaaaattgtagacagccatttctctttccaccctgaactttgtgtttttcagagtgaaatcagcttttgtgaattcactggcccaatttgtggcactgggcagatgaagactcacctgagggcagggatctgagctcaaagagtggaaagcctgggttaaatacaggcaagctttgtagagaagttgtgtcaggctcccagcacaaagcagacggtggaattatagtatgacatgaggttaaggaagggacagttccaagcacccatgtatactgtaaggagcacactattactgttctgtcaacctgggcaaggggtggggtgctgtggtccaagagccaacatcctgggaagaaccccagagagggcccatggctctcccctaaggatacagctggccacagatgtaaagaaggagccagaggaccagttccacagccttccttgcttttctccctctggtctctgtcacggcttctctttgactgattcaaactagaggctagaggccaaaagcaaagaggtcatttaatgcagtcctcagagcaagtccccacagatggagaggatggggtgggggtggggagtgggaagggaagctcacagactaaagagtgaaaggttggtgccaggcccagtgaccgtcttgtaaaactcactttgtaataacaagctgtctcctccaaaaagggaatgccctttattctttttttcacttttctcaagacagagtctctctatgtagccctggctggtctggaactcgcagagatccacctgcccctgcctccaaagtcctgggattaaaagcatgtgccattatgcccagatttccttccctttattcttaataaaagagtgtatagtatttttcaaaggactttaagataggaaaatttgtacaaacattaatttctaaacattgctaagtacaaagacctattgaaaagcgagtcttgcaaatttgcactggattgtggccccatatttcaaatttctatagaaaacccttaaatcacctgtagtgatatttttagaggaaggaatgcataaaatataagaaatgtaagaaaaatgtccccttcctgggtgttgctgggtggcttttgtgtagttaacaactgatgttttcctagtgtttgtaagctgatgttttcctagtgtttgttgttggtgcaacatcagtgaaagtcaggtggaaattcaggtcttggaggtcacaccatcacatggtaaagccaggggagtccaaattaaaggttcctgggagacctgtgtgtcccttataatcagtagttccctgggactcaatgctgcttccgaaagaggtccttggaggacactaagctgccttgtccctgttattagtatcttactgtagtatgatatatttgtcacaagctgcaatcagtagtgatactgtgcggtcatttaaagactctacttttcagattcccaggttaatcatcctgtctgcctctgtctgggatcccatcctggaggccatgttacaaagctgccaggtccaccaaggctcctcttggctaagccagcttctcagggttcccttgtctcctgggatgacactgacatatttgagtgatgcttattgggtatttttcaagattgagatggtctgatgtggtactcagatggaggctattaatggttggaccaagaggagaaggaggaagaggaagaggaagaagaggattatagttgcaaagtactatttccagtccatcttattgaggccccatgctctgatggggagttacttatctcctcttggatattttttgttttttgtttttttggaaggaagtcaccctgtgactcatgtagtagagaccagagggtgaagtatcttcatgaattatttgggatcttctacatgggagatttctatttagtttttgaaaaactgactgtattctacagcagtggcactattttctgttcacataacaatgtctaaatgctcctcatcctcagcaacacttggcattgttgactttgaaaatttaaccatttaagatggtgtggagtagtggtgtctcattgtggtttaacttccattcatccattcatagatgactaataatgttgaataccttgtcatgtgcttcttagctattctgctttctcagccccctccgtgtgtgtgtgtgtgtgtgtgtgtgtgtgtgtgtgtgtgtgtgtgtgtgtgtatgtgtgtgtgtaaaatgtttgcgcaggtctacattctttaataggattgtcacttcgttactgaggtaggtagttattctatgttctacaagcaggtgtatcatgaaaatatttgctgtggggctggacacacagttcaactggtaaagggttcacattgcaaacatgagactcaagttcaagttcaagctccagaacccatgttaaaaaaaaaaaacaaaacaactaggcatggtgttgtactgtaattccagctatggggaaatagagacaggcagattcctgaggctactggccagtcaaactaggcaaatccacgagctccagcaagagaccctgtctcaaaaaacaaggtcagtggtgcctgaacaagtatgcctgaggttgtcctctggcctctgcatgcatatgtatacaggggtatatacacatatacctgtgtacacacataaacatatatatgcatatataatgtataagtaaaatattttatgtttatgagaatattttctcctagcctgtgtcttttgatgagcttaagattctgttgaagaattttggggtccagtgttgggagtgatgggacttcatgcattttctatgcaatggtgttaatttttgataataaagattagtgattatgctggtggggatacaggccataacaacattttcttctcaaggtatcttatcttgaaataaaagaaaatttccaaagccaactttaagtcttgtctgtaatcatactagttgtgttgctgtgtctgaagactgaagacacattacagttcttcaaatagcaactgctatgtggagttcatgtgggaggattgcactctgcccttggccagttctgcatccttctttccccataaatgatacagtgcaaagggcttgatgctgctcacatcagtggggatgccatcttgtgacagtcacaacagcagctcctgcaggatttcccaaagatttgacaatggcatttatgcaaagtaacagcaaaaggaaagaagccaagttctgctgcccaggaagaagaaaaccccctcctccagggaaaatggcatcatgtggtgttaactgttaactcacagagtgggtctgagattttgctggcctgttttgaagtaagaacagaagttaaggaagatgtttttggtaatttgatgtttatatataaactcatttgctagccagctttgacatatgactggctttaatactgataattatcaactctgatgttttatatttgcttttgtttctgataaggtctcattttttgcagtaatcagttttcaagttgaaagacatgtttaatctctaattggtaccaagcaaatactgacttcttcggtgacttcagtcagtccttaattatttgaagtgattctatttttagcttcagattaaaagttcatggaagataattgaacattctttagaacctaagctgctttggactgaaacaagagcatctccccttactttagttcatacactgtgattttgggtgttaatgactcagcttcttattcttcctatggtcagcttagacccctgggctctacatctgcctcctacagttactgaccagtaaaactcaggcaaagtctaaatggcccaaggaggaagtagctggaacacactgtaagatccagataaaagatgaaggaagaagaaatatttgcaaagatgaagaaaataggaacccgagattgctgtaaagactggagaacacacagaacttagaaatatgaaaaaaattaaaacatgacttcactttgtttcttaaggttttgactttgactttgtccttaaagctttcaccagaaagataatgtctgccataaatgtatgtgtttaatatatatctgcacatgaagctatttgcatttttagccatgttcttttctaagcacccattctgtctcgttgcaggtaaacctttttgtgctgctctctgtggtttgcatcctcttaaatctggcaggattcatcctaggctgtcaaggagcacagtttgtttccagtgtgcccagatgtgacctggtaagcaccctgtagcattcccatacttagagtggagtctggactgtctgcctcactggtttgcaacgtgcacaaaccagggaatgtaagctaggagacgcctgctgttaggtacgttcctcagtcactgctcatttggccagagtagcaagtggccagtacaacccctgtatgagagcagtgtgaggcagcagttaggtgggatgcatggatcaggcctccacaatcgatgtgcttgcctgcatctagagagcaaaaatggatattaccagaatccaggtcaaagatcctttatctgaaagctttgaaggccaggtgtgcatcagcatttggagatttgctgattttgaggagaaatatgatgcacaggccatctattatgtagcatgtcagtggcatctgggacaggaggctgtgatcaagacttgtggttttcagagctttctgggtctcatacttgtgaacaagaggctgtaaatttacagaatttctgactttaaaaaggttttatagagtcagcattgtggcatacaccttcaatcccagcattcaggaggcaagtagatctctgtgagttcaaggccagcctggtctgcatagtgagttccaggatacctaggactgtatagagaaaccttgtctcaaacaaaaacaaagaaagaaagaaacaaaagaaaaaaaccaactcaaataattttttttttaattttggtttttcgagacaaggtttctctgtggcttgggaggctgtcctggaactagctcttgtagaccaggctggtcttgaactcacggagatccgcctgcctctgcctcccaagtgctgggattaaaggcgttcaccaccaccacccggcccaaataaataatttttataaattgtggtgaagtgctcataaaacaatccattttaaccattgtctgttacagcacagtacactgctgtgcaaacagtctccagagcttttcaaacagccccttgctagctaccaattgtctttcttatcaattcaaatactccaaagacattcatataaatagagtcacacagtttttgtctttctgtgggtgatgtcctcaaggtataaccatggtatagtctttctttttaaaggttgaataatactcccttgtccgtacctatgatgcactttgtctgtcattggttggatggatccttggactgttgccaccttttgtctattgtgtataaagccaatgtgaccagcagcgcacagatgtctctcccaaatcgcattgtcagttcctttgggaatcttactctgaagtggaatttctgggtatctaaatgtcaaaaaagttggggtggggaatgtctggtaatcagtgtctcacttagtataaaagcaggggtagactcttaatgggttatagtaaatcttttgtatttagaattttgtcccattgcagtctaccttatagaaacaaagaggctgcaagccaaaaaggctgacttattacgagaaaagctgtggtcaagttcttgcagtgaaactcacaaccttcccaatgagggaagctcccaggacctcacaaaacctgttgttctttttcacactctttgaaactttaaaaacaagcattaaagctttttgttcaaatgagagtggtgaccataactgaccagttggtgtggtgtgaatgtcttcaggtgaataggaagtatatgttcagtaaaatgtgagaggcacagtggcggtctgcctggaaaggaggctgacacgtagtcccctcaggtatgaggtttattattatgaaagggactcatattggttaaggttcctattgctatgataaaacaccatgaccactaatgaggtaatgacttccaggttgaagggtggaaatttagcatttggaattggggaaagttttttttttttttttagttttttattttttatatatttgaattacaaacaagattgaattacatgacgatcccagttcccttctccctcccttcatcccctgccactcccccacaactaaaatcctacctgtcatatgtcctttcttctaatctacacctgactcaacctttctgctttggggaaagttttacaggtatttttttaggtgacttaaagtatttgaaaagaaataagaacaaatctttagacatatggagcaggtgtggaattaaaaatgaaggtgtaggtgttcggttggcaagggtggtgaaagaaatgcactgttgcttactgtcatttgcacagggcctcagggacttccttgtggcaagtaggactggaacttgtcattcaagaccatgtaatgattaagccttcaagtagtcctgtttcaagggattagcttgcactcatctggacaatcccacctgtgtctgggctcacactgaagacttggaacagcagaagtccccgtgtacttggttgtctggtgggagactacagccttgctgcaacccctctccccggcccatcttccttcactaaacaccttcactaaacaccagcaagaatggactggggaggaagggaccctttgtaaagtgagacctagcactgccagagagaactatgaaatttgggcctttggatgaggtctggaggtttgcttcaagggccagaaatggaaaccaccctgagccatgtggaaattagtttggttcccatgaagaggaagcagaataagttatctgcagaagggttgacttgttactacccggtactgtgatcagtgctaactcaggcactgttcaactaaatgtgaagcagccactgactgtgggaggagtaggacaaagggatggtaagaggtagaggagctgtgtgtcaccagtcaccaccctgtggagccgagcttagagagagagcctgttggagtggtcatagtccttttcatttagagggtgagaaactaatgtctgtattaacagcgggacttatctgcaacactgtgagacgatggtgggaaaattctaatacaaacagcccagtgtggggtcttaggtgtgggatgttactgtgcacagtagagataactgtagaacccatcaaggtgactctgattgccattctttgtatcagagacagaatttatataaaacacagatataataatgcatcctttaaacatgattttatgatgaagcataaaaagtgtggaaatccatggaggtctggaaggaatcctactaatctaaaggaacaaaaagaaagaatggtagttgtccctggagaggaagttgacagagactgatggagaaggaattgttgtgaaggaatgctctcagatgtgatggtaacagctggtgtagagaagggcttgggttacacaagaacaccgctgtgtactcctcaaatgatacacttactatttgtatataggtaatgtttttgttttgttttgttttttcaagacagtttgtctttgaagccctggctgtcctggaactcgctctgtagaccaggctagccttgaactcagagatctgcctttgcctgcctttacctccccaatgctcagattaaatacatgtaccccccaggtataatgtatatataatatgcaaatttcacctcaaaagagaaaataaactataatagcattttcctgaatgatgcataatctagtagtgggaattttttctttagtttcctactcaatttcaatacgaaaaaccatttttttcttattttcacaaaactgaagctcagttctgcaactagaggttaagaacataattcaataagaaaaaatagcctcccccgctttaacagttaaaactgtgactgtgtagtcgttgaagattcttgaagagtttgcagttactgagttgagagctgcctaattaacaattagtgaatgagctataacctcgccttttaggaaaaagggaagcaaagccaacttcaccagttcagactgcagagcaagaaagaaagattgcctctgtcctctggttggagattatttacccaaaccaggtgttatgtattttctcagcttgcttacgaaaaacttggaagtgaccaaaagtttgcagagcatctcgttaagaatgtgtgcaaggttactcatcaattatcacttcactaaaaacatatgtctgcattgagaatgagcacgggtaggtctttctacatggttcaggactactattcacagaattcaccctgtgtttcttacccttgaggtagattgggattcttctgttttcttgaatcatgtgattcactttggccacaaagttataagctaaagtgatgggcaacactaactctgattagtaaaattagaagatattcaagtgagtttgaatttcagataaactgctaatgactttttttttttttttgctgctatcaacatgcctcaagcaatggttgatacattctttattttagacagttgtttgtttgaattcacacttacattgggtgccctatattttatctgacatttcttatctgtcatttactgtgtcttctgtatctcttagacatgtctgtcactcatgccacagcactgagatggtagatgtttcacaactctgagttcccaaaggaatatgacaaacagatccccatgttggcctgctgtggccttatagcatgtataggaaacagactttggggctgaagagatggctcagcagttaagagcatgtcttcctcttctagaaaacctgaattcatttcctatcacccacattgggtggcttacaacttcctgtaacttcagctccaagggatccagtgccctcttttggcctttttgggacttgcacgcatgcacgcgtgtgctcgcatgcgtgcatacacacacacacacacacacacacacacacacacacacacacacacacactgaattaaaaataaaataaatcttgaccgatattgacattgacgtggaaccatacacatcacatcacatcctgtccaatatatgctgtgtggtgtagcaatcattgttcttcatctttccttaaggtggacttgggtgaaggcaagatctgcttctgttgcgaagagtttcaaccagccaaatgcacagacaaagaaaatgccttgaaactctttccagttcagccttgcagtgctgttcaccttctgcttaaggtatgattgacagctcacaggctccactgagaaatgcaccatgggggcccaagaaggctccttgagatattccctttcggtgatggccttctaatagtcagactgctaagagcctcactaatgaccctcagttagaggagtgcagtgaaggccacatattgcatctggagtatggagagggttcattgcgtttaagaatatgaactgctaaaaagaagttggaaaggaatctaactgtgtttatacacacatctgaggtatagctttcaggagagcctcaggtgtacactcacttggcattgtcattcatttgcagtgagtggtgtgaacttgttgaatgttgccattctaggacatacagactaagatcagctggaaaatgcaggagacacttgagttctttgtatcttgtttaataggtagcaattatagtaaggaaaagaaatttaggaaaatatgcaaaggattcaggtcaaagtgaaatgcaaaaccaatccaatggagctggacaactgtggcctggctgcagtgggtgacaaaatcagttggtgaccccttagctgctggttagtcaaccaccgctgactctctttagattgttgattttggggaggaggaggagaaggaggagaaggaagaggaggaggaagctcagggagagaactcttcagagctgccatctctgggtagcacaggacttaaaaaataacctacttgctttgccttctgcatatttggtagttgagtcatctggaactttccaagcttgacttagcttggggaaagcccctgaaggaggagccagggctgtagccacagccactttcggtgttgcctttgttgctatttgaggaaagaagccccatttactccctggctgctcctggttcctgctgtgagtagctgggtgcctggggcatcagtgccagttgctgccaaagtagaagcagtggtggcaggttaagcagattgtatcctgctgggaagcactactgtgggatggggcaggacaccaattacagaaggttttcactgttcttctggaaggaacatttccagatagcattatataaagtgtccctgggagattggctccagcacccctgaggacactgaagtctgtcacacccaggccccttccatacaatggcataggtttgcacataacctgcacacactcttctgcatgctagagcaatctttaggggcagtacctggtgcaaagtagtttgcaaatagttgctgtatcatttaagaaaaaaaaaatgacatgaaaagggtctgtgcatgttcagcacagccttgttcttttttgaacattttctgtttggggttcgttgaatctgttgaaccccatgaacaaggaggtctgactgccttgtgtgtaacactaggcctttgtgagtttgtgagacacggagcttcagggtttgtcttttttttttttttttttaggttacttaatttttgaattggagtctgacccttaacagggaccctcttgcctcacaccctcagggttctgggattataggtgtacctcactatacctagtttaggttggttttgtttttatttgtttgtttagacagtcttactgtattgtccagtctgggtatgaacttatgatcctcctgcctttgttttcaaatagctggaactataaggttttaaaatgaagagatctacattctggcagagggttatattagccagcatttatttcagcacttccataagccagatactaactccctgcccttgtctgcttggaagcttgccagtttgggcattgttattgacgtgattttacaatactctgatcagtggtcttgttgtttccagaaagttctgtttgccctgtgtgccttgaatgccctgaccaccacagtgtgtttggtggctgctgctctgcgctacctgcagatctttgccagcagaaggccatgtattgtaagtatgaggaaatgctgtgcagtctttacttataactgcccatctctactgcgtgtggaagcactgtgtggtgttttggcctagctgtccatccctactgtgtgtgggatcaccatgtggtgttttggcctagctgtccatccctactgtgtgtgagattactgtgtggtattttggcctagctgtccatccctactgtatgtgggatcaccctgtggtgttttggcctagctgtccatccctactgtgtgtgggatcactgtgtggtgtccatctctgctctatgatccgatgctttcctcctgtcgtgctgttcaaacaggatgaatcccaaatgtctgcagaagaagtggaagagcatggacggattccagacccagatgactttgtgccgccggtgcctcccccttcctactttgccacattttactcctgcacaccaaggatgaaccgcaggtatcattcctaagcaacgtggggtctccgtggtatgttccatgttcagacttgtatggtctccggaatgctcagcctgagcttcccccttttttttctctaacatccagccaggttgtcctgtgtgggttgttctcttccctgtcgtctcatttctctctgataaaccagatgactccaaagataagttcaaccttgacctagagatacactttttcaatttcaattagcttcctagagaaaactgacacccagggagataacagctgtaatttgacatgattgagaattcctgttgccctggaaacgtgccccgttaggcagaatcgatgtttcattaaaataccatcagcgggtcccaacagtcatgaaatcctttgcaaccacaaagaaaaaaaaatattaattgaatctctctggattatttttaaatggataccatgcttttttccttttcaaattccagctcaaattttgactcttttcttaaatctatttgtagaatgaaatgggcatttgtctggttgttagtgattcctggaattgaaccttaaaagaataatctctatttactcactaaacactatcaatcctccactgcttgcttagtgctatgctggattatagaatgagttagacatgcttccttttccaggacaagggctcagtctagatcactaacttgtgtgttaggattgcagtagtcagtgcccagaggtcttccaagctcagaatagccaactgggttacccagtcagctctggcatccatagagaagtgaccttatgctgagttagaggttaaaccacataaaggaaaaaaatctctggggcctacaggaaaattagcatctttagcttgatatttggggatcaggcatgtatattttttaatatccatagtacatgtatggatattacatatatgtacgtagtacagctatgcatgcatttgaaataagttccacctaggcattactaatgttctttgaatcttaccttaccccttctggaacacctgcccaggaagagacagaagagggtcacaaagctggggaaggggctattactcactgagtggtcagagggcattgttggatctggaacagcaaggcttttctttgtttggggagtgtcctgctggcaatgctgggaccagggtgagatgatttgattatttcatacagtaagcggagacttgcagatggtgaagagggacagcaataaaacacatgttctctgtggtccatctctagttttagaacctcccaagctgatacttctccactgctaggtctgagttgtagaggagcccagagaaaacaactttccaggaaataacagtcttgtatgtctctatcttagtcagtattctgtggctgtgaagagacaccatgactatggcaactcttataaaggaaagcatttaattggggctggcttacaggttcggaggtttagtccattgtcatcatggtgggaagcatggctctacatctggatcttcaggcatcacatagagtaactctgcctcaagtcagcctctctatggtaattgtgagactcaaagtttctctgctgaagttgtcagttagctatagttttgttgttgggagtggggtgtccacattccaaatgagcacagatctttttgtcaactcagccagatttgctatatcaagttcagagaaaaatagaatgccaaccttaatccacctctctactgtccttaatatgacactgttttttaaattttatgcaattcctcacacaatgcatcattagccagccagggagtgcagaatgtctgcctgaggaagatgtgggaatcattttgtgatttttccctagctctgtcttgtcttcaagctgtgacattgctcacgttttgtttgaaatcaatgccccccagcctcaatgcatgggggaggggcttggtcttgcctcacctgaacataccaggctttgttgactccccatgggaggccttaccctttctgaggagtggatggggagtgggttgggggaaagtgggggcaaggaagagggagaaggggagggagggggaagtgtggttggtttgtaaaatgaaggaaaaaattttaaaaaatgacagtgaatttctctcatgaaccagacattagggaaaacaaggcagaaaattttctctgtgtactaatacaggagagaatcaagatttctctaatccttagttgttttgactgttaactatatgattcagtggtgtttagaatattcaccacattgtgcaaccactagctctgtctcattctaaggaaatgccacaacacataaacagtcagttcctaggcccctttccccagagcctggcagtcacccatgctttctgtctctatggactattgtttgttttttcactgatgtgattaaaagggaaaaaaggtgttacattttatgcaccatcatttgcctaaggaccctcctgggcattttcctaggacagtttggatggttatccctcttctggactgagtcactgtgagctgttttccccagtctggagacaaaggcagagagagggtctattgcaggggcctgtgtgcagagcgtgcctcctgatgcccagatgctttttctaggatggttggtcctgatgtcatcccattgcctcatatctatggagcacgaatcaagggtgtagaagtgttctgtccgctggaccccccacctccttatgaagctgtggtgagccagatggaccaggagcaggtatggccaaaggaaacaggtggcatacctcacattatctgaaggagtttactgtggtcctttgagcaatgatttgaaccttttctttctttctatctatctatctatctatctatctatctatctatctaaaaaatcctctttctcccttcctttgtgacacaggagtcttcattccaaatgccagaaggaccagaggctgctgcgagcccatcagagccagtttgcacacaaataactcaaggtaacacacatcttcattccccaagccataattcaatagattagaacatctagtgaatgttctgaccgttttggctggaggtaaggtattcttggagcaaatggtccagcccacatcctcttgtcagggccaaaatactgtcaacttgtagggcttagaaataagatctaaatgtgaacatgaagaagaaaaaaaatatactgaagtaaagataaacacctagaatctttttatgaataatcaaactatccctaggaacccatggactagagtggagattaatttgtgattcctgtatttcttaatcatttttttttgttctgttaaaatgaactgaagtctttcaaagggacatgagtttcgtgtattgcaatgtatgttctccctgtcatttacaaccaagggttttaatgccaagacaagtaagatttttcagtcccgtggcctacgctagagtccgtttacatttatccttgtaatttaaggacaccattgtcccagctttctgtctttggggaggttttaaatggcctagagaattgtccactggcacaaaattgcagatggcaatgaataatggattgactttcagccatttccgacggaggtagctgttcagcagggctgtgtggaacagtctactagtcaccttacatctgggagggggctctctgtgcccctgctgctgagctatactcctaccgtaagaagaactgtaaaacagcactatctccccttaagcatgtttgtgttttgtattcatttatttgtttttaacagggatttttttccaaccagaacattagcttcccagttgatgctgctgcatttccagggtagggattacgcagttccattgtgatttgctgattcattttgcagccactggctccttggctggatggctgagagcatcccaaactctgggccaggcagatgtgcatctgctagtcttggatagcaccctcgcccatgtgggtggcacctccctgaagagccagatgctgtgcaaagctcaggttcctggaggctacatcaagatgccctagtgagaagattctggacacccctaggaaataagccaaattcatgtgctcccatggcttcttaattttgccccttggccttattgttttcctggtttgcttgttttaagtgtggcagggtgatttggagatgaaggctttgccatggttctgggaatggaaaactgactgggccaccagcctaagtaaatgttattaattgtattactcttgccttggcaggtttgggcctgcaggtgtttcctgaccaacattttgaaggctgcagctgttgaattatgtgtttcttttgtttttgtttttaaaccaggtggggttcttcctaacccaactggtgaagaaaacatatctgcatccactgctatctccaacctggtgcaacctccgagaagccagagggccctcccaccactgaggacaaggtcaaagagtgaccccttgcttcaccattcagaggagagaggtgacatcatcccctaagcctttggtagaccactgtgtttatctgactggtgctaagtatgggctgaaggggcctggtacaatcaggtagctcttcctagctgaggaccgtgcaagttttatgcagtatcttgagggaggttaagaggccatggaaaatttggagaatacatgtggtatgtctttaaaattaaaaataatttgtgtgtttcaggggagggtgggtacactatagtacatatatggaggtttgaggacaatttgtatgggtcagttctcctctaccatgtgggtcctggggactctactcaggttgccatgttggaggcaagtgcctttagctgattactggccctgcactttgtttgaggctggtagcatttgttcctgaaatcattggcagtggcttttggctgcccttgatgctgtgctggccgtaactgcaagattattgtgtcaaccgtatcctaatttctagttgctggcaggcctgtgagaaccagtcaaggggcatttgcttttactctttggctccatgattttgtatttgttatcttttctactgtgtttgagtagtcttaattattgaaatctgaccatgcttgaaaaactttgcatatagtgaaacgtgttcacctccttcatctctctccctctttgttttggggtttgcttgagtatagacattgaataatttgaaaatttcaaaataatgacattgagccttttttgaatatatgaataccttaatatctacaaacatctctcattatagaaaagtatgtaaaaataaaggaagcaaaggaataaagtgaacagcttttgtaattcagccagcaagggcctcttttagggaattagtctagtagctgcactctgctctttggaaactctttgcagattaattggacatcctctaaccttgctctcttgggtcctgtctggcctttgtggtctctgttctgtccctctgacagtgagtgtcatttgtcacaactctggactgaccatatggaagtcacagaggacacttcttttgtctctgcagcagcttccaggtgggaaggaagtcccacctcctgacactagctgtgtgcctctgcagaccagtaagcttggcagtctggcctcttattccaaaccccaccttccttgtggatctcctgtatcctacctggcaagttgagtcttcgagctggctatgcgccagcttccaggagcacttagatgttggcccagcaaatggagaccttccttgaccccctttgcattctgcagtcctgtggaggaaagggcatctaccctttggcttattttgctggggaaggcaccaagttgcctccagcgagcgagtgtaaaccccactctgtccccacatggctttagcctgtgattctgggtgtttggaagactcattgtctataacatgcatgtggaaagttggaaggacagaactcatgtctacctctctccaaaggaaaaggaaaccttccctttctccgtccacacttccaccctctgcttcctgcttccatcagtatcgaaatccccacttgcaaggcctttacagattcaagtcgacagttgtgtgcactgaaggctaatggtggcttatggacacatggggaatcagacctgagtattcatttcttcatctagttcatggagaaacagcttcctgcagtctttatacctttatcgatggaggcagctgtgggaataagagcctgcggtggatttttagagcctctcttgacttcgggaatgatgtaactttctgcacctaagttttataaatagccatagatccgcctcatagccatggtgtgagcctccgtaatagaagtcagtacagtgccattgaggatgtttaggccaaaggtactgtgacagtaaactttgtgccatcctacaagtctgtcatcagcccctcttctctttgaccattccacactctaacattttttcatcactccaccatgttttttctgcttggtcatccattcccatctacctgctgtaccccatgaaacacgctccactgtgaactctgtgctgtgtcatctgtctttgccttgggaggtgttcatgtgccatggtccagtgtcctattggaagtgcacttcacacaataggcttgcataggtttcatttgccttcattcctttccttcttcaagagagaggtgagatggacatgcatggccccaggcgtctgctagatgttgtctacactgagatttacggccagtgtccagagggggcttggccaatggtgatatgtcatttacctctgcccacagctaccccagtgctcagctgcgaagctgccactcagacagaaaggaggctagatctggctgcggtgaccctgaggagaggtgtgcgaccaagggcatcgagatgcagaccccactctttgatagattacaggtcttacatagacaccaagctgctagtggccaggttcctggaacagtcttcctgcagcatgactccggacatccatgaacttgtagagaacataaaatccgttctgaagtctgacgaggaacacatggaggaagccatcacaagtgccagtttcctagaacaggtactgttatgaacaatctcagacatacatctaataaccggtgtctacagtggctggaggaagtccatggttacagtctccagggtcctgggagtgggggttatatcatcagagaggaaactacagagctcttcttctgccctttgccactttcccacagtgctcttggcccaagggaagagaacccaattttctggcaggtggaaccatgcctggtagaaagcaaaggttctggacactgtggaattcactctgcttaggatttcctcagtgggaggctgcctaggatgtggtgttttctcagcccttaaaaatgacagactctcaagactggcaaggttctaggagctgttatgtgcccatgagttgcagggccagacaaggtagctgacaggacttagaggaataaatatctttctctccatagattaaaaagtaataggctccctaaactgaagctgctcttggaaaagacaaaactaggcattcatggactccatgtgggcctcgggtttctcatctttaaaggaaagggttgggtgaggtagctccagccccatggaatttacttacagtaagacccttctctttacccatctgggagctggggttactgttagctatttattccttctctgggttagtggggtagatgctgtggacacaatacaccataatgcccagtgttacctgttctgtgcctttgcaagtggagtgcccaacagatgtgtcttatgctgaattgggctggttctcagtgtaatcactatttcaccattccaggtagacttgaacagttcatctcttcactttcctttctgatcccctgttctactcactggcatttatttatttatttatttatttatttatttatttatttatgccaaaattcaaagtcagattctttcccagtcccctaggggccattagttagaggagactcttggcttccatactgtcctgcagcttgctcttcaagagtggttagtcagtggctccgggttaggctgtgggtggcagacatgtccgaccaggcatctctgaggtgctccaagtgtcattcttgcctcttcctctgtctggccccagtagcccataaacagaagcaagcatttggagttgcttcttgaaggctgaaagggtgatgaagaaagttccagggcatctgccaggcactctgtttgcacttttcctgtcctgatccctggtggttagctctgggttacaggaaatacaggccctgacaagcgcctgttttgccccagacaagttggaagttcaagtatggaggttattgttacaggctctggctcatcagctgaggccttctgcttctgaaccccacatggggacatcagtgctccacccctccccagacaaaaggaggcaaggacaatgcaagaggacattttacttccatctctactcagctttccacactttctttagatccattttactcatccccagtaaaacaaaacaaagcaaagcaaaacaaaacaaacaaaaaacccacttgtcttataatagccaagtttgacaaacagtgcaattgtcttaattaggagacagaaacaggccttatagatggatataattaagacagtgagaaaatttaatatcacagctttcgtgggcattaaatgtttcatggccttgagaaatcagactggaacagagtggctttgggatgattgtcccatgaggttgtctggcagtgagattcccgattctttcccaaggcactaacagtatcacacaccatagtgacaagacagttcaaccttccacagacctgtcagctggccaatcctccttcatcagtcctagctggatgagaaatagtctatatttttgcatttttgtttagtaatgctgttctgtgtttaaagttatatgacacattaaggacaggcctggcagtagagccattctccagctttcacagatcgtgtcctgctttgtacactgtttatccaagggttatcagatccatcagaagcatcactggtcttaatgagcattttataaattcattacctgatccagaccagtggctctgtgttggtaccacctgcttcttgtttaaaaatctcaggcttggagctggggagatggctcggtgggtaaaatgtttgctgtgcaagcatgaggaccactgtttggatcctcagtatccctgtagaagcaagtcatggtggcactggcctgcaactctagcagatcctgaggccttgttggcctcccagtctaatcaaagtggccagcatcaggtgcggtgagagactctctccaaaaaatgaggtggagaatgatagaggaagacactgaatgtcaactctggtctacacattcatagagtgtactccacacatgcatgtacacacacacacacacaccaccaccaccaccaccaccaccaccaccaccaccaccaacaacaacaacaacaacaaatcaagcttccacatagactgtcagaataggaggcaggtaggacttgacgttcctcacaagctgtgctgcccacatccctctccatcattaggagtcactaattgacttggaacacagggatattggagaactatgaagagaacaatgttaaaaatacaacaacaaagtacattgtgtacggcttgtctactgctaaaacaatagaaaataggagaatttcttcaaaaccttacaaaagagagaaagtttaaaacatgtttagaattaactctaagtagattctactttggaaaatagtattctgttctgaagcaattaaacattaaaatccacagacagacacaaaaccatccccagtaaggctaacatcttcccttctcctctttccccaaagataatggccccaccacagcccagcacttcccaggcccatgtgctgacctcgaggagacagccgggcctgctgcacctgcacagctgtggagacctgagcaccttttccctggctggaaggccaaaagaggagaggaggccccagcatcgagcagaggctgagcggccacacagcctcatcggtgtcattcgagagactgtcctgtgaactgagtgacctggaaggccagtccaaaggaaggatgttcttattcagaactgttcactgtctgggagttgggggtccccctgggaagctctcaacaggggtccttgggagaacacttattcctactctttggctcctttttttcttttttttgctgacgagggcactaaggtgaactcgggtgaagtaggtcttttctggtctttgtgctcccagttggaggtgaagagctctccactgtctgctgtatcttgcagcattcccaaggggcatacactggatgagcagaaaacaggctcaagagtctttgcctgccttgccccctatggctctcgttgccaagttcattcccttgctgcaagtggagaactgctgggctatttatagctgcctgcggtctctggctgctcagtgagaggagttggcaggagatgtgatggttaaccccatgtgactgcagtcctccagcctgctgtgggactccaatcccatcctctttagggaaagcaggagacctgctaatccgtgatcttttttttttttttttttttttttttttttatgaagggcattaagggagaggactatggttgattccatttattcatgcttgcaaactagaacacctaagagagaaccagagaataaagtgttgactttggaactctgggctctgtgtgtatgtagtatttgtgtgcactcagatgaccaggccttaactcatagagcactggttctcaaccttcctaatgctgtgaccccttaatacagttcctcacgttgtggtgacgacaatcataaaattattttcattgccacatcataactgcaattttcctacggttacgcatttgaatgtaaaatattttttggagctagagctatgtcaaaggggtcatgacctacaggttgacaaccattgtcatagagggtttggatcttagggatgtggtgttcagagtgctgctattggccaccaaactagtttcattccacagtacctgaacctcacagataacaatgcattgggcaagccctggtctgaattttactaatgctaggcttgaatggcaccaaggaactgcattctagtggggccatcaacagaattaataaagcagttactggtaggattagtgctaagaagtaagggggaagttagggagggcacccttgaggaaatgatatttgcactgggtcttgactttgaggaccaggtattcctctttttcaggcagacaagaggccagggaggctagtgatcacacacctgtactgaaggagaggcaggtggggacctggcaagctgcatttggtgctgacagtgagatactgtagaagtttccaacacaaggcagataagcttaatcacagttttaaaagatcaccatgctacttagaaaatagttaatgtagataggagaggaagcaaggagctgaaataaggttgcctgggaaggcgagcactggttcttactaggccctacttcagtcctgtgacgagggtgttaaagtctcatttgatgctcaccacagcctgcttggtgggagctgctatttgtctccattttataggataataatattgcatgacttgtctaaggtcacacagaagtcaaggggcagagctgacattcacaccgaagtgatcggattcagatacctctccatgtcttagcttcccaggtagtagtgtctgtgtttcctgtttctgtaagaacattgttgagcttcctgcttggttcatggggctctaaactcccctggctccacatctaccacgaatgccagagtaagaattggagagcccagaggtcactgaactgtggtggaaagtaggctttggaaacatctggaaatgagggagaaaggaagggccacaaacaggctgggtctggctaactgtgccctagtgaaccacgttaggggagattcatagcaacttctcaaaggttaatttctgttcttatcacctccgccccatccaacttctcaaagggtaatttctgttcttatcacctccgccccatcctgagtggggcacacatcttctggtttctctagaagtcctcgctatcacactgtggcttgtcaccagaggctggtctgctgcccacagtcaagcccatcttccctgtgagtctttgcagtgtcagacctctggcatcactgctggccgcttgctcacacggtagactgcccatgtggccattgtccagtgcattcaccccagtcgtctcctccaggtgaggcccaggagttggtgagaggaggttctggccatgcctctgtgtgtggtcagaccttactcacacaacctctgcccagcccagctgccactccattttcctccctagctgcacctctttctaagttctttcacaagtcccttgctggttgcctctgactaccaccactgagctcacagaatgcctcaaaggcttagggtgctgtctcagtttatcagaattacctctgcagagtcaaaatgtctcatgtaattctagaacctgaagctattggggaagacttccatctctcccttgacctctaccctccctgtaatattacggtattgatgatactacaatatcttatgagtatttgttttggtggtacttcatagtaataccattcattatcctgtgtgtgtgtgtgtgtgtgtgtgtgtgtgtgtgtgtgtgtgtgtatgtgaataaagaaataccaaagtattaacaacgtgcataagtgctcatgggttaacccaaagtgagtagggtagactcttctgtcataaagggatccagagatgaggacaaaggatttcaaatgtgacgtcagaatgagaccagagcattggttactgagcgtggaaacatcaaaggcttcactagtgaagcaaatgtcattcaggataactggctggctagaacactgtgcaatgatggttggctatgcttcagtaaataagaacacggtgcccactttgtgagattggcacaggataaaccaggacagggctgctccttcagaatgttcttcaagcttatcttagtgtctgaggccagagtggaggattctcccaagcttctgcacttcatgaagactagctcaggcatgtctggctgccagttgcctggaggcttgctttcctgcctgatggtgaggatccgaattccagctgcccgcctgctctccttttccacaggaagcagacatttgctgatggcctaactggttcattctggttactttctctgctcaatttgccaagtgggggaaatggaggcacagtctgacttgtgcagtagaggcaagggtccagactttccacttttggttcaggacagagagactcaatttgggacaaaagaatagctcctttccccaaatctgtcatggactaaaagcttttctaaatgatagtaaactggcttgacagaaaaataaagtaataacatatcccctttctcgttaaagaggtttatttttttcaaatacttttaggttcactggaaaattgagtggaacgaacacagattgttcactgtcctctgtccatcatagtcattgcctcctttgttatcagcatcctgacttaaatggcacgtttgttacaatgggcccataattaccacccaagtcgatgtgtgtggggactgaatgaagtcctgagtgaatgtgcattattgccatgtcaaggacatgcttcagacccctggaaatagcaaagtcttccctgggtcagaagcagaggaatgacagagccttcctctggtctaggtataggtattacgaatgactaactgttagctaaaaccagtgtatgcagacactgtcaaccaccgtgtcctcctcctggacaaacctgagaatgctctcttagagagaacacccaccaagccttctaattctatgtgcataataaatgtttctccttgctcagctgtataactatgagcccccctcctcagtggtatacgtttacgtggtaaacgtagtggtatatgcagtggtaaatgggctgcctttctgggctgctgcataccccacctcagcctttctaggtgggtatgtctgttgttttcattctgtaagctgtgcaggtcaaggcagaagtgcacatgagtttactttttgtgtatatcttatggtatagacaactgtgtgccatgtatccaccagtacagtaggacagatagtggtttatctgtctaaaaaccctctttattccgagtattcattcctgtctcccaaaagacacaatattttgctgtttccataattttggcttttctggaatgccatgcaattatgttaatgttttctggggtgacatgaacaagccaatctggtcacctcagataaggtaccaacaacaagccaaagttagcattccactcaaattcagtatggtgagccaataaatttatttaaaagaacatgggtgtggtagaaaattattttaaggtgtgtgatgcttgtttatgttgcatttgtctaactctgtgaaggtgtgattccttgcctgtctaaaacacctgatggtctaataaagagccgaatggccaataggtaggcaggaacaaaggataggtggggctggcaggcagagagtataaatagaaggaaaaatgaggaagaaaaaggatcgacaagagaacaaggagaggaggatgtcaggggccacccagccaggcagccacccagttagctacccagttagccacccagcaagccacagagtaggagacaaggtaagatatacagaaataagaaagataaaagcactgggcgttggtggcacacacctttaatcccagtactcgtgaggcagaggcaggctgatctctgtgagtttgaggccagcctggtctccagagcgagtgccaggataggctccaaagctacacagagaaaccctgtctcgaaggccccccccccccaaaacaaaaagaaaagaaaagaaaagaagccagagggaaaaggtagactggttaaagttaagaaaagctgactagcagcaagctaaggctaggcatgcataagtaagaataagcctctgtgtgtgagatttttttaggaactgggtggtggacccctcaaaaagacctaaagagcaaagaccccaaaagagcaaaaacatctcacagcacatggatgccccaaacatcaatgcatagtgtcactcattatagatgatgacctcgtggaggctgcaccatggggtctcctttagttaaccctccagttcaggtctgccatagacttggctatcattgtcttgtttatcttatttagttgcagtggttaatggctgccacccaaggttatctctactccaggatggcaatgggatgatcatgttatgctcaaaggaagaagccagtactcaggcagtggtttaactgaaggctccctcccccccagtctgtcagttctcacaggctaagctctgccttccataccaacacaccagttgtagaaacaagaaatgatgaaagcagagagagatgtccactggggaggtcagcggaaaaggggtatttgtgtgagttttgtttcagaggatgaactgcggcaggaggcaagaattttgtatatttgagcagtctttttcagggtttggcccctcatcatctcatcttttgaccttcaaggtgattcagagttgtcaatcatggctgttgtcggagggcctcatttggtttttctaaggtgatctgttccaagcgtatccttaccctcatcttgtgtgtggtctatcctgcctactagggtctattgcccttggaatccaaggtgctgcagggttagggccaggacctggtgttttagctgtaaagggggatgaagtaaggtaggtgtctcagttttcaggtacacaggctgaggaagtgactgtagggcaacttagtagcaggaatttggcccaaagtaaaggagacagcacaaaatgcaggaggagatgccaggcttttattctgttccattcctccatgagctcaggtgaggagtcagagctttttagcaaaagtggctgctatatgcctggtggtgcagcagtcgtgagcctgtatgtccccttttcagccaacttctttcatcaagaaagaaatgtacatccaaggttcctcatgccttctttaaatttggtaattcaacccttttaaaattgtttcactagtcatggtgtcagccatgcaggtcctttgtgtcatgtaagttagacagcaggtctacagtgaagggaagtgagtgtttattgcaggagagtacccttggctactccagagccataggaggcttcgccatatgcagattagctataaacagagttgtgtatttctttttatggggaagggttgggacaggtttgggggacacattactcatggctcaaaatgtgtgtctctgcgttagaattaccctcatctccacagagattttattattttaagtctactatgctgggccagagagatgtctcagtggttaagagtgatggctgttttacccaagttctgcttctagtacccatgctggcagctcacaaccacctgttgggccagctccaggggatctgatgccctcttctgacctcagagggtacctgcacaaacttggtattaaccaccaccatactacacacacacacacacacacacacacacacacacacacacacacacacacacgatggggaggagggagggaggggagagagagtgagagaaagagagatagatagatagatgaataatcaaaagagcagaccatgttgacggaataataataacgaaggtgtgttgaaggtccttgggacaaggaccgtctttggtcagattggcagtttctggtcttaaccggtttgcccttgccttcctgcttttgtttgctttcttgagtgttgctgcttcagcaggacctgaagattccctggctcagtcacgaaaatgatctttcagattaactttcaaaactcttctgtttgttttctgaacttaatcttgtctctggcctgtactggctcggagttggtctggggcccactctggcctgagtcatccagtttcccctgaacctgttctctctagtgggacctgaggacatcgaagaggaggactggaagggagcaggggcaggtgggcacgcacctttgttttgtacctcctctttgcaactgaggtttcctggagaggcctacggtgccaaggcccaaggctctgtgagtccctcagcattagaaagagctggcagagggacagggagcctctgccaacctctccacccagtgggagaggaattcttgaagcaaaacaaaggagcacatctctacctttccccaggctgctgcaacagagaacaacggagggggttctggaaaggcctccacaaagccatctttgttgacaaggtgttcctccctggggcctccaaaaagcaagtgaagcctgcagccagaaggcaccacctttcttccatgtcactctgttagacactcaacaggtattcactgcactacagtgaatcttaggcagagggccagggctgaggagagaagagagggagggagggagagaggtggggtgagagtccccctaataagtaaatgaacaataacaagagaacaagtattaggttcaatgaaagaaaaacccctggctggttacagggaatgtgcagactgtaatcgagagagcactactgcagtacgcaggggggtcagattcaacctgagcacaaggacattagagatttttagcaagggagtgtggtggtggtggtggtggtggtggcggtggtgctggatttgaacacagggctttgtgcacatgaggcaagcctgctcttgatgaaccacacctcagcctttgggtaattctcaatcgatcaattcaataaaattcagaccgaaggtcaaagccagaagatagaaggtgaagaatgaggaattggtcagatctgaagggggcagtttttttttttttttcttttttctctagagttggaccaagtgggtcaggggcagcacctgagcaatggaaggggaatgggctttaagaggggcggaagactctgagtttggttcaggaaagaatctgtatctgtgtcattttcagagtgggaggctgtaccaccctgctcccttgcctcaagctgtgacttttgagcagggaggcagtcgtcttccagtagcttggcaagctcttgtgttttgccctaatgaaaaagcaagagccaaaattctggatgagtcatcgtttctctcttgccaagtggctgtaggtcccaggtctgtggaggctttgccagtcccctttagatactgtgtggattctaatccaaaaggagtgattcacagtggactcagggagagggatcaggcatgagagaatttcaagtagggaggattgttggaaaatttcagcttttgtttgtgagctgctttgcctatgtgtcccatgccagctttcggaaggtgagcaagttttcaatggtaaacccaactcacaagccacaggcattctgtgggggagggttgcagctttattgtgtagccaaatattgggccaaatattctgtgagagaaattcaattgcttgagattacataatctaccagtagtaggactgtggtatctgttttctgcttctgtcatgagcaattgctcagttctccaaggacactgatgcatggaaattgggaggtaaagagaatagacagacacacacagggagttgagacatcaacaccacgacattacttctctttaaaaaaatttttttgcatttatatatgttcttatttacttattttgtgttgtgtatatatgtatgtatgtgtgtgtgtatgtgtatacacgtgcgtgaacagctgaatgcacatcttatagagtatttttagaggtcagaggacaccttgcaggagttggttctctccttctactatgtgacttcaatcccagagactgaactcaggccaccaggcttagcagcaagtgcctttacctgctaagccatctcactggcccaacaacacttttctaaaaggagccataaaaacaccaagtgtcgattacatataatcccagcactcaagagactggtgatgaatcatgcattggaggccagtctgtattatataacaagaacctacctcacaaaatgtctgactttatttattatgagatcttctagaactatcttttcttattgtgttgactggtgtttctagtgcagtgtgaaagagcattgatagatatacatttttacctttctccagatcttagaggaaatacccctgatgctattttactttaaaaaatttttatttttagagacagggactcatgtgttcctggctggttttgaacttctgaacatcttgcctccacgaccttcacttgtcatgtgctggtgatataggcatatgccatcatgcctggtttatgcgatgctggggattgaacccttaatacatgctaggcaagaactctaccaactgagctatatccttaggttccaaagtatatattatttatcatattaagatgggcccataccatgatattaatgggtttctattggcaaaactcttgaattattgaacaaacctcactaattcgtgatgtattatttcttaatgtaatgtgggactctgctaacattttatttagaaaattcacaatggtatttgccagtatattttcttacagtgacttaatcttatttctacataggtattatattttctctataagattaattagtatgtcttccgaaatattttagagcattgggctatctgacctttgatgatagattcgatggcagatagatttcttattctggctcttttgtgtgggatagttcctcaatacatgtctgttattgtgtaatatatattccctctacacctgttggtatatgtttctttgggtcttcattgctggaagagtcttgtgtcatgtaaaacttacattaagtaaactcacttttttttgtcttgttaatgaacctatgatgactttagattttgaccccctctcctgtgatttttgaagcccaccacagtgatattgtgcacacttggggattgaggatttatacttgctgggatttgtcacatagggagtttgagcaggaagacccgccttcaggatgggtcagtctaagtcttgccttgctttgtgttttgggcaggaagcttcctgtgatcacagatccacccactcagttgtgcttttcaagtagtgattacatgtcaggcacaatcccaaacactgtgagaggtcccacaaagtctcatgtgcttgaacacttggtccttcgcagagccaacagcctgctcaacttgtgagtttgtgactcctccgtgatgtggggcttggctaatagaactgggtcacacaaggagggcctttgaagggagtccagtcctgcctctgacctagactctgcttcctgttgcataagtgctagaagcatacccctgtcaccacacccctttccccaagagtccatgccttcccagtacaatggattgaaacgtccttgaatggtgaccccccaatacacttttacttccctaaatagcttctgtctggtattttgtctcagtgatggaaaagttaacaagcaggaaataagcagtgagtgcaggacagaggttctattctccttcagttcaccttcggtcaggaatccacagcttttcattttctgtggaaatacaagcaaaacctttatttctaagtagcctgtccttagacttaaattttgaagtcaaagcatttttaaaatgtttaagttggattaatttagcagtatttataatcaaatgtattttagcagcagtaattctttcctcggcaatcaaacaatttaaagacatcaatatggcatatagtatccagattctctgtgtactttccatctttatgtggcttttttaaaaataaaatacatcagaattttattgtttggagaatacagcatatgaaatcacaagaacatcaaaattatttggatcactaggcttcaaacacagaatacattaccagatgaagtaaaatattaattaacctgaagtctacatcagaaagaaaaaggtatggaaaaatacctaaattgtttacttgagaaacatacacttaaaacaaagtaaaagaatgttccagtacaaatttaaaaagtttatgtggcttttttttattactttatttttactttctttctttctccccccacctcgagacagggtttctctgtggaaatctgcctgcctctgcttccttcagcaaatcctacgggcgccaccacaaccggctactctatttcctcctgttacttttctctcacaagcctacatatatttttaaatgcagtgtaaacctttagaggtttttctttatctggatctgtctttatcatctcggtagtgccgagtccaacgcccaagagcaccgagatggtgtgagcatatggaagctgctcgatgcctctcagcgccggacagggcaggtttccctctttgggaaaaaaaaaaaccttggggcatggggtcatcctgctcactgacaccattctgttacaataaatctttctgccaaatgccgcctgagccccaccgccacgtgtgagctttacgacagccgcctggccaagttaggcccaaatgaatacacagagacttgtgttaggttcaaagatgcttggccagtgactaggattcctcatctgctagctcagtctcaattatcataaacctatatattttataagacttatcttatctgacaccttactggcgtccctccttgccagtggatcacatcctgcctctggaggaggaagggggaaaaaaggacccttcctgtttctccttcgcttaaatatgagtctccttgctatgtcacttcctgcctggatcaccacttctctactacatttcccagagtcctctttgatttctagtcccgtctaacttgctgtctcaatggccaaacagtattttatttaacaatcaataagataagcatacacagaagtactttccccatcacagcataataaaaacattaaaaatgtttccaaataatttctaatagggtggtgggaggggttttaaaaggactttatatttagaaatctgaaaggaagcctaccataagccgctagggttctgtattctgtttggatattgaggcagtctgtggttgtcccctcccaactccatgttttcaacttgcccagatgtttggacaatgtcactgtgcgtataccactagcattctagcccctgctcttatcccatctccctcctcccctgtggtctggccactcggcgctggcttccccattagtcctgaaatgggcagaaaacttgttcctgcctcagggcctttgcataccccaccactgcaagcaagctgctcaggatctgtgtcagactctcccgccttcccacatatgcctcttcggcctcctctttcctaaactgcaaccctctgcactttttttttctctcgagcacacatcatgatgtgatagaagtatatattttgcctaattatttttatctcttcctctggaacataaattgtagacaggcggggattttgtttgggttctgcccagctgcacagaatgcagtctgaagccacacttgatgactgacagcagaaatttaaaaagagcccaaacattccacttaacactgaaagaccttttgattcaccactggctatggaagtattatgaacgattaggcttaaaactgtttttaataggaagctttctcattgcattttcagttagattatacttcacagaattccgtttccacattgttctttgtttaaattatccattggccagtttcgttgtgttcgggagcagcatatacctactatccatttggctcacatattggactcttcagggcgcagggtgggatgtctgggcttggtaactggggcgttggtgcaggggcagtgcaaggtgtggccggtgctcacaggactgttgctgcaggaagctactctgggcctgatggtttgctagcagctggcaggggaagcagggtcagagggtagggagaccattttcttctcaagtcttttggggatccagatcctccagatggcagccccatgtggatgttcacacatcctgtgttgtagaaatcttgggtgtcccaggtcaagagaaacacaccccagggccagatcggctggaattctgagaacccactgcgggctacagtggtggagggaatgttctggaatgtgggcagggttgctgggaagccatctaagagtgccttccagctcgataacttcccctctctgcttgatttactttttcatgagagccacttgaaaagcaaagccacagaagggggtggggcttcctcccttgccccaccctcacctgctttgaaagaagaagccaagcgatcaccagatgactagagaaatggggataatcagctcgctctcctgctgattgtactccagggtttaggagtactgctgcgttttgctgtgtgccaccaggtggcgccagagcaccatagttttggccccataacttgggtccgcccgaacagggtttcaggagcaggaatcctgctccaccttaagcatggcgattctcagaattcctggggggtttttcggagcgcctgctgtcactcatagctcatttagtgagaaatgaaatagaaaacagggttttatcgcgtcctttactacgtggaccccatgatctaacggtactctgcccactgtgctcttcttgtcagaaaacatcccggttccaccctggtctctgtcttctgacacatttgttcaaattatgtgccgttcataagccagctgacacagagacttcactttctatgattaatgttttctttaccagttttgttacatgggaaatatagcaggctttcttttgggtcaccagccagctcccatatcacatggagacttattattcattatgaatgtgtggccttagcttatgcttgtcccattagctcttataacttaatttaacctgtttctcttcacctatgttttgccttggggctttttaccttgctttcattctgtatgtcctagcccctatctgtctgtctggtggttgcctggcaaaccctgggcatcttcctctctttctccctcattctctctccttctcttgttcttccagtcagctatttactaaccctgcctctctgagcccaggctaattttatttaattatttaatttaatttaattatttattttatttaattattattttaattaatttatttaattaacacatctttacatggttaaacaaagattctacaacacggaaggaagcggttctctctctctttcactaggagctaggtgttttccctttagcttctcttgccgagtgctctgtggaattctcttaggggctcagaactgcaggcagctgggtccaatttgggcccctttaattagcagctcagtggccttggcctactgcccttgttaagggctgcttccttaacaagagagggagcttgcgatggtccctgacgctgccccggggacccaggtctgtcagatgggaaagagaggagtgcctggccatcgagggcctcatctctgtaggagctggggttgttctttgaagcttccggttcttgggcacaaacttaacatggggaagctcttgccctgctgatgccataaatcaagaaccaaattcctcatgcaaatgctaggagttaggcaaaggcagaggggaactgatggatgccaagccgaagccacttagcccgtgtcacgatgtgcatcatgcttgggctggctgccacaagcaactcatgttcccttccttgctttgggtcctttgctgtgtgggagggagggggggggaggcataccctaaagctcagccaagcgaaccagtactggccagtaagaggcttgggcaaagggtgatctctgactctagcagggctgattatcccaaagaaaacctgaggccaggaggcaagcgtggtatggagccagccattgctgcccatcacttctgtgatggaaacctgcaggaggggtttgccatactgcatctagcccaggacacagcagctgaagggtgtgtgtgtgtgttggccatgtagaccatcagccatcgacagtgggtgtgtactgccacactcctgatattacatggccccagcttggttagctttccaaatctcactcgtgctcctgtggccagccagaagttggagtcacatggagagaataggaagcaattctaggaagcaatagtctgaattttagtttgactcggggcattctactgcactcgctttgtgtttcctcagtaccaactgtgtgtggatctcctcagcgtgctgttccagagtctatgcctttgaattgtatggtctctacctaatgacctgacaatctctggggtggcccacaagcagggtcactgccagtggtgtaatcagcctgcctccaggactccaggacctgaccagcaggaagagaaagcgcctctgtcagcctccgggtttgcacagtgagagttagtcagtgagtcacagtcctgattgtacctgctgctgaaatgtcctcatctggaaagtacctgtgggggagccaggctaggtctataaaattcctcatgctgccctctgggaatcttgtagttatggcttttccctcactattccaccagaaggcatcaaatctaccattggatttctgaaacttgtggtttccctgggagaaagcaaaggaagtgatgggaagagttgaaaagtcatcctgaagcaattagcaattagaaatgagtagcactacagtttttatccagccactgcctccatctgccaggctacctaccctctgcctgctgagctcagctgcaatcaccagagtcaagcgctgcctgaaggaggctggcttcagggcgttcatgcaggctagcctgtcaatttggcatgctagccttgtccattagacacctatagagccctctctctagtccccaaaaggctctttctaatcaatccacacaagataattaccatcaaattaattccatgatcaattaagaatttttaaattgtggtagaagacacgataatagaagagttatcatttaaaccattaaaaatgtaaaattgtctgaaatatattaaacagaatttgcattgctgggtgttgaactaggacctcacatgtggtaggtcatcagtctgccctgagctgtaggtctgcctgacctttgctgttgtgggtgcgtgtgcttgtgtgtgttcctgtgttaatgtatgggcgtgcatgcttgtgtgaagacacgtgtggagggcagggtcaacatcagtaggtgttcccctccaccactgttcacctcgggttttgagacaaggtttctcaatgactctggagctcacatattgagctagactgctagtcaacctgccccaaggctttttacaccgctgctggggattgaacccaggtccacttggttaagaggcaagcactttactgactaagccttctcatccacgttaattgtttttaagtgagcagcttggtaacttggtgcagggggactaaactctgggagcacatttgcatttaacattgtagaagatcgtgatttctgtgtgccttagtcttgttgattaattaaataaaccaaccattcggcttcctgtaggtcctcatgcgctaacagtttttagatctccctttcagctgcaaaatttctgttcgcactagacacatgggtcccacaagatgagcacgctcagtgaggtcaagtaacggaagagcagattcagcaagacttttagaaaactaagaccaagcgactctgtgagacttagggtggctggcatggggctggccgaaggaggtggagctttccagaggggcggggcttgtcagagggaggggcttgccccaaacagaggctcactcactataagctctctcaggtccttctggtgataccgtctgccctccagttgaggggtgttgtcctttgtgcaaatacagagaccaggaaagcgcttccttccttctttccctgtggggtaaggtaaggacaaggaagtatcttctttgcctttgagatactctctgcccaaagctggtgtcacccgacgcaggtggccctcttccttagtgatggtaggtgttgtttaggatggggccgctggtggtggggaagagagagggcaaatggggggccagagactcgtggtgaaggttgtgttgcctagaggccatcagccagggacactgctctgtgaagagggttctctttgtaggactagcctgccagggcccgaggggtgttctcatggaattcctggtcagtagcctaggtcagctgagtgagccaggaagtgtggtctgtgaccttctcaagggaacttctgttaactcgcttaacaggaagagggggagagaaggtgcgaagcaaagattcctaataaagattcctcttgctgctcccatctccatctaggtctcacagggaggtgggccacactgctcattacttaggaggtgactgggtaggggcgtttaaaaacagtgagggggctggggtccagcacagctatagtcactggagcagtaacttgatttcttaaaccctaggctcctgagctataaatgagaagtggcctctgcctccttcaggtgttgtggggattcggttcacctatagaaagtgccttggaagggttctgcccggaggccaagctttaggaccagctgagggccatcgtctgtgagtggctccttaggagggggttcagtctgtcttcccaccctgccttgtcaggtacaacgtgggcactctgctctatgtgatgggagaagaggctctgccacagtttagatttagttggcccccaaagtggaagcgggaagctctgggctgctgttgtggtctccagtgtggctgtgtggaggagggaccttaagagccaccgctgaatggaaggcaatgaggacaaggcacgcctctctgcaggaaggtcagtgctgtcttgaaggaatgggatgggctattgagttgtctctctagaggtcacccatgggcttggccacttcttcaggccactggctccctttctgcctctcttcctggggcctctggacaggacactggtgtgggcctgtttggatcttctagaattgtgagtcaaatgactttcttctgacgttattgtccattgttattttcacaatttaaacattgacacattaaaatttacatatgtatgagttattgagaaattctcacaagaaagctgtatcggtgttgcagattctaccaggcagactgactgattatggagagtttgaatgttacagagcccaaatcgaattatcttggagctatttttagctcccttactagtcatccgttgagcccacctctgtgtctgagctggcatccttgtggctgtcccatggacccttttaggatataacagataccaacacacacgttaagaaagacacccatagcatctgaaattcctgtgagatttcccttcttagccaggagctgtgcaccagatgtttcctcccgtgcatttgaaaggtgcctggaactatagctgccttttgttctgcaactgtaagggactccgtgaaagggtagctgttactgagttgaacatggtatttgggacaacctgaatctgcattcctgggtcatgctcgttcatgtttggctctagaacaaacccttttttccctttgagatgaaagctgagttttgagttgacaggtaccgtgcgatgttttgatatgcaggtacagataagacaaacaacttctgagatgtcctaaatttaattaccgagagctagagagtgaagagatagagagggggttaattagtggtaaagggtaggttgaaaggcacaaaaggcctacttccatctggagtgtgcattcacactccatcagggctgaccacttctatctggagtgtgcacattccatcagggctaactaccagggcgaccgagacctacttacatttaaatggtttatctagatagttaaccccagctaatccagaagcaaccatttctcctcctaaggcttattgtgagctgatggttatggagaaaagccacactgtgggcttctgtcctgttccaaagcttcccctgctgggagtcccacctgtctggactatcccaaacccctccaattggtagcacatggtggtgacatacttgtttctcaaagttttattagaagtgcagttagtcttgaccactctctagccctgctgctggtagctgggggaccttgtcccagggttgcttttctggctgctagctgtaatgacaggcctgtggcgatggctcagagggtgagagagcttactgtgtccaagtgtgaggacctgagctcttttgtaacatggtgaccttttttacctttgggtatgccccagtggggctgctggatcacgtgacaattacataatttagttcttaaggaatttacacgcagtgttactcactaacattcttttttcttctctttctctatggaagttgctaacattcctgtctcctttgccactggccattccacgtgggctgagttcatctgattgtggctttgatgatcagtgatgttgcccattgggccacacacctgtttgacatttgtttgtccttcctccctccgtgtccctccctctctccctccctccctcccttcctcccttccttcctttttctgtcttccttccttccttgcttgctttcttgctttcctttttctttttcttcttttgagaaatgactgggtttgttcccgttttaagattactatcctttgctatcgatccccttatatattctaaaattatcctattgttagatgcatagtttgaaaatgtttctctcacttttttttaggttgtctttattcttttgtttccttcactgtgtagaaggtttcagtttgacgttgtcccatttgtctatttttgtttgtatcacttgtgttttgggggggtcttattaaaaaattcttgatcattcctaaaatatttcccctatatcttcttccactcttttgagttttatggttgagaccttagtttgtttgaggtggtttttctgtgtggtaagagatggagggccagcttcactttcctacatcgtctagtctgctctgttgtgctgtggacccatattttacatcagtagctgtttcaattattatagctttgtaatatatattttctttccttttttttttttgtttttgagacagggtttctctgtggctttggaggctgtcctgcaactagctcttgtagaccaggctcacagagatccgcctgcctctgcctcccgtgtgctgggattaaaggtgtgcaccaccaccgcccggcttgtaatagatattttcacattagatgataatgcatcctatgttctttgggctcaaatttgctttattggcttatttttttttgctttagttaatatttatttggtgttcccaagtttgatcttttttctagcatgggaagaaagtcattggtattttgattgggattgcactgggcctgtagattgctttagtcggtatgaacgttttaaccagtatcaactctttgattccacagacagagatatctttctatgtatttgtgtggccttccaagttcattttgtcagtgctttatactgttcattgtggagctttttcctcctggataatttttttttttttgctactgttttccattttaatcaattcactgttgctttgtagagacactcctgactccagcctgttttgtatcttgtccccaaccagtggtggagtcttgggagttgtctaaatatagactcatgtcatctgtcttttcagtgttttatttctccatgccccagtcttcctgtatatgcataggaatttgtccattttttttagtttatcattttttttggtatagcattgttcatgacctctaatgcttttgtattgtatagtataagctgtatttctctctgcttttgtgtttgatttggttctcttttcttcagtttgttaatttacttttggaaagaccaacttttcattttgctaatggttcatatttttcttttatttctcctctggtctttatttttttttcttctattaactctggggttcggatctatactgcatttttctttctttcaggcacaatgatggatctctcccacctcagttaatctgcaaacaccctcacaggcatacccagatccgtgtctttccaacctcctgtgtgattctaaatgcagttaagtgcacaatgaaaacgaaccatcactttacccgtcacttttagtctattacgtgtcttcagaagtgagtttcttgtaaacagcacatagtcgactcatgttttaatccatctttggtgcagtgaggaggggcaggaccaaaccctgcatggtgtactggaggcaggagaccgaagcagctggagttgaagcaggctaggctgcaaatctatgccactggagccttagttctcttcctggagccagggtggtccagagtctccatccaggagcgcttgcagatcccaagaaccctgtccccaagctagtgctcctgttggagggtctttgtctacaaccatctttttaagcttttcagcctcaagcattttgttacagagacataaagtatgatagctaagacccagtgatggtggagcacagcggtgctgcatgagactttgacaattcccagggcctgtccctggcgcttgagctgcctcttgggaacccaatccccaagttgggttgcctttcccaaccttgatgcaggggcttacctgcctcaactagatgtgccatgctttgttgacttccatgggaggcctgcccctttctgaatggagaggatggaggaggagtggattggggtggggagaacagaatggaagtgaggaggagggaactggaggggaaaaggaggagaaattgtggccagtatgtaaaataaatgaaaaattcataaaaacataaaacaaaacaaaacaataacaattcccagcctttacctccccgggcttccagcagctgcagggcacagaccctaagggacctgcaactagtttttcaggacagtcagggaaattgttctaatcaagactggggcactagcggggcaccagccttctctttcgggagccctgctgctccactcatgcccttggcagcaggaaaaccataccaaactttgaaaagtggaattgcagagagtaccaggtaaaaggcttcggggtattctcacagcatcttcaggttggtcccctgaggcactgttttccacattgaccccagccctaggtgaagaccacttctgttttttattgcagagggaaggattaattttggttgttcttcctttaatgatgatacaaagtatgacacctatagggtcctttctcccatgacacccaaagggccacttctcccttttagcgtgccccaaggaacgctgggaacactgtggggtaacaggccactgagccagttttaccagataaatacctgctagcaaccagttcccacaatccttagagctggaaatggcctgttaaggaagacaaaatcctccctgcacagggagccccagtcctccctcaaacagaaaggcactcaggcaggctaagaggcgaagtccttgtttattgttgcagcaattcttatacagacattagcgttcagttaaataaggagatagcacattaaatacatcacaaccccaaaccagacaactgcagccacggcacaaagaaggtgagggtgggccaggactggtgaccagactgtcagaggaaatacattcagtgtgtgtgcagtgtcaacattccaggctcacgtgtagatatattttatttatatatatttatatttatatatagagatcattgagtttcgtgtatacaaagaacgatattgttacaaatacaatactatacttttcccgatgttttacagtaagcgctaatgcaccccgttacagaatggggtgcgagttcatactccaggtgctgtgctaagtatgtacaagagatttcattcccacacggtcatcacacactgccttggtggagggaaaatgaaatcagagttgtgtgctcaagtggaccctaaccagggaaggagcagacggaggtgaaacgcaaaccaacaggtagccttgtgaaggtgagagttaaaacattagcaagaggtggcccttggttgtaaacattggtgacagctacaccagtgggtggagagacctgagcagggctctgtgggtgggttttcatcagtgtgcagcagggagcataggtgtgggtggggctgcaggagggagggatggggagcaatgggggaggtagtaggttactctggactccctgaaggccaatgttcagaaagcaaacccgtgtgcagggaggtggcagcctgctgtttgctctaccccccaggagcctgctgtggtgtgggaggaaggtatcgctcaggaagtgggctccagccattatctgtggggctttcttcctctcatgaactcaaggctgatggcagctccctgaaatgttcccgctggagaaggcagaggcagcgtgggttgtggtgcaacctcattgaactggggggatggtgaatctgggagcctgtccccaaagaggagtcacatcatgtcccaactaagcaggcagagtggctttgcgccttgcagtttggggaagtctgctgagtacatagtaggcctcctcactggggtgatgagatatttacatatgtaagtatgtaaatgaggatgccagtggagaccgaccccaagtttaaccactcagcctgatgccaactgaggaagagcaggcttcagccacaggcctggaccaggctctgacagctctccctttgggtgagaggaactactctgattaacacaaaagactaggtaatcttccaatcacgctcaacaattctctagaagagctcacaagaaaagcttggcttttaggccctcttaaagcttccacggtacaacaagaatagaaagtatttttctctttcctctttccctgggatgaagacacttcattgtgattatttgggggttagactgggcgtgatgtgtttgtggagcctgtccctgaccagtcccaggccagcctctgctgtcttcctgtccctgtgcttgggcatatccccatggtggcctccttggatcggacaagcataagcctctcaagacactttccaagttccccaatgcctgaaatgccagcaatgatatctcttttgtcctctccatcggtcttgggggaggagagctggagtgcacttttcagtgtgtgattatattggatacccagcagattagttagctcaggagaggcgaagaaaatctgggcatagcttctgctcctcatacttgcaggggtttgacctggggcgtggtcacccaggagcatttggttggacacccttaaaaacaagttcagatagctgggctcctgtgcttccaatgcccacacggctctgtagcagcagcagccctgtcacttctcagacagctggtggcatcactgggacttttgtactagagtaaagctgagggctcccctgaagattcttgcaagcacggggctttcctgattctgcccagacaactcatgaggtcagaagcttcttgttcctcatcttgttatattcccatctctcccttccccagaccccacgcttccctccacaaatccatcctccctgtcagggctccctgaacgcccatcttccacagacaccataacataaatgtcctagatgcagaggacagggactatattcatattacaaaatatattagtttttcttcccctgtctctactgaggtcatcaatgaaacaaaacaaaaacaaaagctcaccatgtcccacatggaaacaaactgctctttggaccaagaataagtggggactggctcagaataatacgaaagcacatgtgctagactgagacgttgttcagaacacgaggcacccgatggagacactaagccttccacactagctgcaaactcccagacctcgaagacagtagatgctgtttggggagcacatttggggattcctaggcccaacaccaagcatgaagtctgcttgatttggtgacttatctagtttatctagcctttgaaataccacatcctcctgagtggctgtgaaagggcccaggctggcttagccttggggcaggacgcatgacactaggttacccttatcatagtttgtccctcaagaacctccagtgtgtatgtggggtgggggagtcttagagctatgggatcaggagggcctctttctcagggcaaggctggccgctttctgcatgtgtcaacctgctagaagggatcttccagcggggggcactgggggttccccacaggctgtgtgctagatttccagcctacctcaatacaggtagagagcaaatgagacaccctgcagggaatgtgtgtgtgtagtaagtgcttgtgcaagctcacaggaagatagtacctgcctgtggttaccctcagattggtaaccttgtgacaatctcggaagtctcagaggccctgtgacttcccaggatctttacaggatcacagcagccttctccagggtgtttcttcccctttctctgcagttaggtctgtattagcacacgcactgaaactaaaaggaactgtggaagagatttaaaactggctcagaaattccaggcagaaggaatgtatgaagccctaactagatagcaggctgcccctactatcttcccatcagatgtggcagggagggcgggagatcagcaattgaattttaggcactgcgcagtcggctcctttgctgcctctgggagctactccagggaagtatgtgcctgggatgatggccccctgggcagtgacaaccacttcaggactcccaaaggccctccacaatgatcccaggtagatattaattatgctgtcctccacgctcaagggggcacacacaaaacttcccctggtactaaggacggaacattaaaaaaagcaaactggagagagacagagagcaaagaggtgtttgcccatccttctcttcccgtgtaagaccaaacgctgggtgcgagaggggaatgtctcagtggacacacaatgcagcagcacaagaaacacaaccacggtgaggagagtcctccatgcacgctgccgccacggaggtggggctcagatgtaaacaggctgctcctgggctgtcagcagtctgtacatggctgctggcatcgtcttcatgtggatctgagggcagaaagccaggttagctggggctgagcctctcacaatacacagtctccaagacagcccactcccaattgcctgacttggcctaggaagagtgaagctcataggctttctaaaaagtttagggtgactgcaaatgataaaatctgggtaaggcttagtttttcagtgaaaggctcttgttttcataaccctttgaaaaaataaaatgcagctccatgggaagaagggctctgggcttctggctgcttgcttccatctcctgtcttggcagtgtgggagcaccagcccatctaagaccgctctgctactaaagcaagaacggaagccccagaaatgtagttaggacatgatgtgagtctacgccagtgctgggggctgccggctttgtgagtcttggatctaatttgtgtcttccaaccccacttggtggaattaattggggaaaatgagagaatttgggggagtcacagagtagtaacacaaaatgagtgtgaaaggccagcatgtgccaggggcacacatagtacctcaaccgtgttcagccccaggtctcattcctacctccccaacagcattggagaggatgtggacgatcttctcatgtggtgtggctacgacactctggccattgatttcaatgatccgatgtcccacgcggacccctcctctctcagcgattccccctctcatgaggctgcagatctaccagaggtgaacagcagattacacttagtgggcagcgccacatctttgaaccttgtgggagtggaagacggtcttccctggggccctcaggctctagcatgagctccccttagaagctgacttggtgaggcctggggcatttaaatctctcaggttctttttatgaacaatgggttctgtggcctggtatggagcttggtggttgaatttttaactagcatgcacaagatcctgcagatgacccctagtgcatatacagcagcagtaaaagtagggtctgtaggcctactgggctgccttgtgcagactttgcacaggggtatgacaggtgtgaacttcctagtgtgctgaactctgaccactttccatccatgttgggcctatctgttggtggtcagtgttttagtcagccttccatagtctcaagcaggcttacccctggaactatttgatgccagaagcttgtatttgaggatcactactgcatgatccaaagaggctctagaagcctactgtgttccatggtgtggccagaggagagaggtacctgttgttcttgatttggtggtccctggccaaactcacttctttgatgggtggaagcaatgatatagccagctgttgcatatggttaggctgtgaccactggtgactgaaccctcctactgaggcaggttagggtgactacaccttacacagtaaacaagagtgcctgtgaacttagtaaagctgatgttacaccctggaccatgcatcttcattattcagaagttcatgcagacaagatctgtagcaagggagtttggtgggtctggagcgagtgagttctctggctctaagatgctctcaggccaaatgttctgtagctgattgccacaccaaggatctagggctagggctgtggttccttggtagaatgcttgcctgacacatccctagcacatcctccatccccaaaaaaaccaaatcacaactgaaaatcccaaatctatttactgaatgaaaagatgaaggcaatgggccaagctggaaaaagattcaatatacccacatttccatttttcagtatcttgaaaaagggtgtggtgtgacatgtacttacaattccattctggacactgaatcccagttggtaacgaaggtctggtcttcttattagcactgtggtcaccggagggcacctcacaatgttcagctttactcgggactggttctttaagcccttgaacatgaatgaagtacagtggagcccacagagtcaggcagagtacatgaaagcagacatggctggacacagaggcagtacccacacctgtagtcaggctgtgtgtgcctgagctggagccattgccatgaggcctccctggacccattcagtctgtgtgagatgggtgtctggaaaatgtgtcgagggacctggcaaaaggacagctataagaagagtctcatgtggttgaaagttgagggtgcatatacactgttggtagaaagcctcatgagacacaggctcttttctctacaaggcagactctaacagcgactcctaacaaaggacacttcacagcagcagctcgttcccaaagctgattctctctggtctctgccctcttcttccccactctgcatctggagacctctaactcatgggtattcccactacaactgaagttctgtgagcagttgcctccttgggatcatgaagaaaaggaaacattaggattgtacacgggttcatccttggtcgcctgcccctcctctaggccagaatgggttgtggaagaaaagctggcctttaattatgaacagggaagagttttcagagcctgttgggagcttcccacacactggccacaccatccctccctcaggcaggcctacctaccacctcatcagatacacgctgagaagtgtggaccaggccgaaaccagcccagaaataaacatgccccctccagtgctgctggctctggggaaggcctgttcttcctcgggttgcctcctgcttgcaagaacagatgctctgaggagagtatgctcaaagctctctgattctttccctgcacgggctctccagtgtggagaggctccaggatgtatcacatcccgttcaagagatactgtgcagagaaatggtcaattttgcaccctggagcaaacaaatcacattgatgtggctggaggccctgctgctacagctgaggccaggagatcagagatctctggaaatgcctgtcttcctgcctggactcctgtctgccaacagcagctgactaagaaagggcttagggtcggcttagactcttctcaaagggagcaagggtaaaagggtcttgaggtgggtgactgagggagtgggggagggagggagagagagagagagagagagagagagagagagagagagagagagagagagagagagagattgagagagagcagcaatttgaggaggaagggatttggggaaaagctagcttttattcaggtccaagataactcctagagatagtaccccctgtgacttgatgctcatactcacagtggcatcgccagtgtccccagtggtttgaaacaggctaggggactccttgctgaagagaagtggaatgactgagtgggcatcttctgcataagataccagtaaagattttgtccttctgcggacagcaagtctcattgtcatgtcaacaacagaaagagggtcaggctttctgctcccagtagtgagacaagcatagcttggtgaggaagacagtgctgatgtccctagacctgaaagtctgtcatgtttcctttaccataagcaggggggctcttaggcactttgctctacctgaatttctccacggtgaactgaggtctctgtcaggtccagtttctatatacatcttcataaatgcctcaacctaggacactgaaactcagccttcaagcttcaaaactcagactcggtccccaacatcaaagcaggtatccagaagtgaggcaggccagaccttggctacataatattacatttttcctagcacacctcctctgttctgttcacttaaaaatcacctacatgacaagaaatgggttaggcactggatactagtgggaataagattcgccaggtctcttggaactggggggacatgagaggctaagagagggcacagagagtgtgtgtcagaactaagatgggggatccgaggcagcttgggtcccactaaatccaccccacaacatcccctgcagaccacacaccataatgccaggaacttgtggagcatgaactgagtgcaatggggtctgcatgtagaagtcatggtccttcacacaaagccacctgcttaaatgcttgtacccagccatctggaagaccttatggaatataccaaaaagcgtgagaataaaacaactttccaagcattacctacaaatttcccattgctctggtgaattggtttaagatgcctgttgggtcccttggcaaaatagtttttaagattggagaaaatgtgcttcaacataagtcttcagaaatgacaatttgaaataaccagcacatgacttgttctgctctccctaatcagtatttcaagttgggtcccattaacttagatttccaacctgccattttgttggagtgccaattaaataaatggtcagttcgtctctatgacaacagtgaatgatacagaaaattaagaaatatagtggggagggatgaagccagagtgatatctatagcaacaagagcaaaaccatgatactcgagaagaaaagggaagctggggcactaggtcggaaaagaatggaagtctagagggcagtacttgagggcaagggcatgagcagagagatgttagcacaattcgtctatcaatgactatgctttaggaattaactacaactggaaaggtaagagctaggcaaaaaagaattcagagggtttctgtaactagaaacatattctccttcctgtaatctgggggaagaaaggctaacgagcatcctagtggcaagacgagaacacatcgctgtagactcctatccctcaggccgcaggccagaagactggcaatgccacctcccccaggagtttgctacaaagtggagtcccatttaagacttgtcagaacagataattcacttcaacaggatccctgggtggttcatgtgagcgtgagaagcaatgactgatcaagatgaccaggacctactgaaatgaaagcacgacaggaaagctctgaagcccagacatttctctgccatagctgaggggttggggtgcagcagcgtgagcgtctatcatggtccaggctcaaagtggggtgatgtctagagaactgtaagagtggcactggttttgggagttcctcagccaagacaagccacaggtaggctatctgacttttcagctcaacaaagctgagattctcagaacactgagagtgttagcagtttctacctggacctgcctgctgtgcacatctctgctgagggaggccaccaaggctttctcaggcctcctcttcagccgttgttgctttcatcatcacattgctttttcatcttcccagtccatggagattctgtttccagacatcaaagttcagctcttcaaatgacctgacctttcctccacaggaagctccagggcctctctttgcatttgagtaagctttgctttcaccttgagctggtgatttttggacagagctgagtctccaggcaacattcaaggtggttaggctgacctcatagacaccatggtccctcatgtaaggtgggtgagaggagagttggggtctaatggatagccagctgggcaccctgagcctttggggtttcaggtagagggtggcttatgggaaggtcaggccctgacataaggccaggagttatcagaaattcctgcttcttaaacccaggtttattcccaccttcatccaggtttctctcattcattcattcattcattcattcattcattctctgtctctctgtctccccttcctcccccacaccccagcttgggttgacacaacaaaatattatatactgggcttctaatagttagtcaggccagaagcctgagagtagggttctggtagtcaggtgataagggccctaatctgggctgcagactgtgggcttctggttgctatcatatggaagaagagaagcagagagccccatagggtcccttacataaaggcactgatccaattcatgaaagcatcacccttaagacctaattacctcccaacagccactaggattagggctttaacatgtattttaaagggggcatattcagtctaaaatacccctctccctacctcatacccttttcagacctagtttaactccccataaagtcaacctcgctaacctcactcaccagtttttccctatcacatctgaactctgcactccacacacaggtcctcaagaccggcacaatcaacagtggggctggataggtcttggctgtggaggtggctgtcctgtgcattgcaggctgtgcctatatcactgttttcacagtgagatagctaagacagtctcctggcttctggggcatgcaatattacctctggctgacaatgtccacttagacaccatccctggacggttgggatatcttgggggtgtctcttcactagctgagtgatctgtctctaccaagggccagctgtgtggttgctgttctgtgcctcagttccctactcatgcaatgggtgacattagtacctgttgcatagaaattcatgagcaaccagaagtcataagttcaatgagctaatccacaactgccctctggtcagtgttgggtgcacagcccttggcttctgtaactgtggggccagtcacctctttttgccatgtctagctcctgggtgaggacctacccactgtctggaccacacagcactttgcatttctcacaagaacacacaagtaatctgttcataggagagaagggagggggcaggccagtgggcagtggtcctgcctttcagtagaggtcaccatgacaattccagatcaacctttgcaggtcaggctgagttcttccccttgactccatgccagactattgtctgtcaattcaagaagacacctctaaacacactgtccttcctgatacaaagctaggttttaacttcatcaaagttaaactttcaaagttagatgtttcctctcctaaactcttgtagcctttcacttctatgttgctacatctcctttcagcaatgtaattatcttgtccatgcatggcttctccatggttcatctgagtaccttacaaaggttaagtaaacatatctgaatgaatatctgtattaagcagactttctgatctcatcatttctgtacagccatatgctgcacagtgatcttagtcaactataactcatatactgtagcagtcctgtaagacaatagtggaaatgaaaagttcctattatctggtgtggtggtctgaataggtatggtccccatagactcatatgtttgaatgcttggtccataaagaatggcactattagggtgtgtggccttgttggaggaagtgcatcattgtggaggtgggctttgaggtctcatcaatgctcaagctatgaccagtgtgacagttcattttctgttgtctgcctatcaaggggcagaactctcagcttcttctccagcaccatgtttgctggcatgccaccatgtcctaccatgatgataatggactaaacctctgaaactgtaagccagctccaatgaaatgttttcctttataagagttgccatagtcatgatgtctcttcacagcaataaaatcctaagacacttggagagtccataggatcttaaccccacagcataactcactcctcatgtctgtggtgatatttgtggagctcactacattgccaacatttatgcataaaagtatagcatgtgtgcatgcacatgcttgtatgcacaaaatacttaataaaggctatgttactagcttacatatatttattatgctgtatttatatcattattttaggatgtactcctactcattaaaacacactaattgtaagatagtatgctgtgttatgctattagccccctcatgggtcctataattactgtctctcttggttttaccacaaggccacaacaggtgactgacctaaattatgtaaatactgtgtgatgtttggaaaatgacaaaactgcctaatgatttgcatttccataatggctaaggatgttgaacattttttttacatgattcttggctacttgatttctctgttgagaattctctgtttagatctgcattccatttgttaaatggactatttggctttttgatgtctagtttattgagttccttatatattttagatactagctatctgtcagatctgggtttggtgaagatcttttcccctctgcggggtgtcattttgtccttttgacagtatactttgccttatagaagcttttcagtttcatgaagtcccatttgttaattattgatcttagtgcttatactattggtgttctattcaggaagttgtgtcctgtgctagtgcttgcacaactatgttcatagcagctttacttgtaaaagtcagaaactgcaaacaatgtagacatacctcaactgaagaatggataaaggaattgagatacatttaaacaatggagtattactcagttgttaaaaacaatgacattaggaaatttgctggcaaatggatggaactagaaaaggttatcctgtgtgaggtaacacagacccagaaagacaaacatggtatgtactcactcataagaggatattagctgtaacggaggatcacactacagcccacagaccaagataagctgagtaacaaggaggactcaaggggagcgggggatgcattaatctgactgtgaaggagaaataggatggacattgccagtggacagggaaaggggtctggaaggagaaatgggtgtggggccagaagagatcgggctgggggaagctggagggagaaagtactgggagagacaactggaatctgggagcatctctgggatgagctagaaatctagaacaatggaaactcccaggaatctatgagagttgaccatagctaagactcctagcaatgggggatatggagctggaaccagccataccctgtagccaggcaaagcttctagtgaagggactgggacgtcaactcagccacaaaccctttgacctgcaatctgtcctgactataaagatgtgctgggggtaaagatggcacaggaattgtgggagtgaccaactaatgactggagacccatatcctgagagggagctcacccctgagagcaaggaccgggtgggatactgcagagaactagaatagatctaaacacaagtggcaaaaaccccaatgaaatgattcctaatgatgttttgctattctcatagatgcctatcccaactgtcatcagagagccttcacccaatgtcttagttaggatttctattgctgtgaagagacaccctgaccttggaaactcttaaaaggaaaacatttagtttggatttcagaggttcagcctgttattatcatggtgggaagcataacagcgtgcatgcagacatggtgctggctacatcttgatatacaggccacaggaagttgactgagatactagatggtttcctgaacataggaaacctcaaagcctgcccccacagtgtcacacttcctccaacaagaccaaacccactccaacaaagccacacttaatagtgccactccctatgagattatgggggccaattatattcaaactactacacccagaaactgatggggacagatgcagagacccgaggcaaatattaggcagagttgggataatcctatggaagagggagagaaaggattgtagaagccagagaggtcaaggacactacaagaaaacccatagaatcacctaacctgggcccataggggctcacaaagacaaccaacaaccagggagactgcatgggactaacgtaggccctctgcacatattttatagttttgtaacatggtctacatgtgagactcctaacagtgagagcaggggctatctttgactctgatgtctgtttttgggacctagaccccctactgattgcctcattgagccttaataggcgaggaggagcctagtctcactgtaacggatatatcttggctggctgatatccttgggaggcctgcctgtatctaaagagagacagcagaggaggaatagatgggagcagaatagagggaggtttgtgtgtgtgtgtgtgtgtgtgtgtgtgtgtgtgtgtgtgaaattgggaagagtggaggaaggggaaacttggttgggaatgtataaacaacaaaaatttagaaaaaaaatcgtctaatgacatctctctcagaacttatttctccacacatgactgtatactaaggaacaagtataccacagggatgcctgtcaccttgcccgctacgctcacctgcagccttgcaccagctccacggatgagggtgttggcttttgagggttttcttgagcaccgaatggctactgtacagatggattcacttcccaccctccagggtggttttctctttgaaacccccaggaccaaggaaaactgagcaccccagcctgcccacatgctgggtatggggttctggggccaaagatgctacagtgtcatcctggctacacaagcagcaaggatcagtgtcctctaaaggctatgtatgcagctgtctcacagctaagaagaaaagctggttccccctcaagtagtaacattcgttttctctttaactcctttctttcgtgatagcatcagtgtgggcagacaagaatgagcatgtggactagaacaggttttctccctatgacattcaggcagcggcttggaaggggcaggttgacccacaccagtgttctccgaggagcactcccgtgagctctatagaaggtggtaaatcacctcacgtatatctggctggctataaaggactacgggttatagagatgagaaaaatcctgctggggctgagcctgcgttacatgggaggaagtgagttaactgatgagttgtacctatgatgggcattggattagaagcaggtgttacagaagtctcataaattactcgtgatcctgacctatggagaaacttataatagcaacttgagggttagctgctttgagtacaagtctataccgtttgtagctgtgtctttctaagtgcctgggcttaaacatgttcacaagcattgaggactggatggcagtcctagttcacattatttcaggtctgctactgaggaggttttctcaggcctaggtaccttgataatgctctggcaggtagacagaggcaggcccaccaggctggtgccattaatggacatgatctggtccccaatgttcagcttccctgacttctctgcggggcctccatgcatcatgttggcaatgatcacagtcggtagaatggatccccagccagactctacaatcacaactcccaggatttctcctttctgtttctctatgaaaacctgcagggaggaaaacacatagaaaacctgtatcagcagccatatgggataggtatcagagctggtcccctgcctgcttggggaaaagaaagacagctctttgaggatgtcagtccaggtgagctcctagcgtctctacatccatggcatctggggtctgtaagaaaccatgtcacacaaacccatctagacctcagaattcaccctcatttcatatgaccaatctgacctcaggcacaaacacaaggggcaccaggcttttctgttttcttttgaaacatcagctgtcctttgtagtagtgagaggtttggtggcctgttacactttaatccataagtggcttttggagtctatgcacaggttttctcattccacagcgctctgtaaattattttcagcatttaagattttgagtaaaaaacaaatacatgaaacacttctctgcaaggaaagagagtgacactgaagttgtcacagccaaaaggcagggatgcacatggcaagaacagatcctggacacagataatatgtttgtggcctctggtggctgccaaggaagcaagagttagtactggacagtagtagtatatgggggtaagcagagatgccaggaaaagaaagaccttttggaggcatccaatggagtctgcatacatatgtactagggcccagtccctagtcctaagccacggtcccatatgctgcccactcctcccagctgcttaagcagcagtgggtcacttccctgaagcatttcccacagccaagtgcaagacagtctcgttacacactgcatcgtttcccctcatttaagtcctgtgctgtggttttaatcttagtgcctcccccagtgcttcaacacagagcaaaggtatttacggatgcaactgagctaaactgaggacactagagcatgctccaatccgatgtgctttaagaggagatttggacacatggaagatgacactaggacatgaggagaagaggccatctgtgagccaaggagagaggtgtgaacacagcctttcttcccagtcctgaggactcagacttatcaacagttcagccttgagcttcagcccagaactaagaggcaattcctgtctgttgttggagctgcctcacctgtggggtctattatggcagcccgaaccaatgaatatatccctgcccatcctggaccaatatgggcagagggtacagctacctgtaggtccccttccctgtgtttcacaaagaaggtcatgcccagcaagaccatactcctctttagtacctcccccaactccccatctgctctgagtgcagacttccattgaacctcttgaacaagaatcctcgcctaggacctgtggtccaaggagtctgactcaagacacctaatggctcaaaagcccatgttcttgttcaaagctctttttatctggaggataaagtctaacccttttggttggacttccaaattgtcacactgtttctcctgtcggcacttcctgctccaattgagtcacctccttcctgacatcctagcgttctaaccatcaggttcttacccttccactctgctgtccctgaatattccagccacctggaagtccaggctggtttggttggccctggcaccctccagtcattctgcagagctcagtcgggaacatctgagggtgaagcacctactgtgtgatcgtgtgatctgttttgccaagggcagctgtctttcatcagtgcttgagctggcatatcactattttcagtgccttttcctagactgtgggcttcgtgaggacagaggtcaggacctgtatccatacctatagaattctctcacggggcagaggctgtgcagcctatcatctatatttgtttttggtagtatataatgatagggtctcctgagaggaagccagagaaaggcatgggagccaccgagtgtcctgtccacaccacagttttcagcctctccttccaaagcagggctgccccaccgtctagggccccagccagctggctcagcctggaaacaagttctaggaagtacctacatctttgcagttttccgacttggagaagtggatcaggtcatcgttgtacatgtcctgggtgttgagcaggtcactgtactccttctggctgaggtcttctgggttgatcccattggccctgaggaattcctggtacgccacactgaatgcctgtcctatggactgtgcgatcagctgggcctatagcagcaggataggggaagacagtggtgaatggggagattcctggcacattcacctctggatgattccttgtggcatttgagggtcctaaatagcaggtcacccagtcatcctatatcagggtaccagtgcctaccagcaaccatttgaaaaaaaaatcagtatgtttgtgattatgactgtgcccatatgggagtcattaggagtcagagatgctggacattctactatacaaaggacagtcatacactatgacaagtcattctacatcaagtctatacaagctttggatatcccactggacattcattatatgtaacacgcgtttctaatcatggtatccatgaccggattctaatataaagactcaccctgctatactgcagattttaagaatactactaccaaagtgaaggaaaatggtactttgagattttataagtttcatttgcggttatggcatgaattgtcaatgataaatttgatgtggtatgtcatcctgtatgctgtgagtatgtgttgcttttattggttaatgaataaagccgtttcagccaatggccagaaaaaaatacagctaggtgggaaattcaaacaaaggagcagagagaaggaaggcagagtcagggagatatgtcatatagctgccaaaggagtaacatactggagcattacccataagctataaccttgagtcaatatatagattaatagaaatgggttaatttatgagagagctagccagtaataggtctgagctattggccaaacaaatatacttaatattaagccttaatataagcagctatggggacccaatgggtaggagagaaactggttcagtgggaccaggagagacagagaaaaacatccaactacacacatctctgtcagcctgtgcattcaccatgttgcatgaaggttctgcttgtgtttatagatatggattcttgcttagccctcaattcaaaatgtcaagtagaaaatacctacagtattgcatcaaatacaatacagttctcacagtcaaacttaagtaagcaggtgccaacatctggctgcttcatgacgcttttggggatggctgagcccaaacatttatagtgtcatgattttatcttaacctcttttcccctttcattatacttatggatataagttattttgtagaaaataaaggaaattggagatgttcaatggttaagagtgcttgctgcataaccatgaggactggactaaaattctgccattcctataacaagctgtgcatgtctataattccagcttcaagaggctggcagaggcagtgagcctgctgacttccagcctgactgagaaaatgtgagtcccctgactgagggaaagaccctgcctcagagccataggtggaaaagtgatagaggacgctacccaacaccctcttttggtctttgtgcatacagacatcccgtacttgcttgttcatggggagggggccttgcctagcctagcctggcccagcccagctcagccctcagctacagaacaatgcacttgctccaggttatagtgaaaacaaagccactgggttattcttttcttccccagtgtagataaaaaatagaggaagaaactctttcttatgaactccatgctagatggaggtagcaggggtcctgtggggatctcacaggctggtgagccttctctctggcctgtagaagccaggagcctaaagattctacatttttactcatgaactttcctggcaccatttatttctcttgtgctccatcccagccacagccttaaagcacagtgcagagggagacagaaagaggcattgctgctaagacttgaaaatgaatgtcagcatctcctggtggtggccaccactatggcagctctggttctctatgaagtgagggactaccttggcctcctcacttcttgagggcaatttattgcatctaggtaagcaagtcccaggaggtaaggtgcctggggaggtcaggtgctaacacagtgcagagccactgtggattggatgaaagaacacctctgctgtgaatgcacctttctgatttgacctcacttcctgctagaatggggtccgggatcctggcttggtacagagcagtgaacattttcataatgtctgggccacaggggtgatgctcctgttattggactgggaggagggaggacactaactgtgacagcaggacagctctacacagctctgaatttctctctacaaacatcctggtgccatgaagacctgcttagagtctttagcgtggcaatttgggtcaccctctttcaaagaatgctggctcttcctcaagcacactcggcactcccctgcttcagggcctttgcacttgctatttccaaaatcattttatttaagtctctgctcaaatgttacttccttgaaaaaaacttgaactagttctgtccctctgtgcattgaccatgttttgtattacagcaaagcattccccatgtataatttgttaagttggtttatttattttctacccctttcaacctgcacaaagaataactcatgctctttattcagctctacacctgcagttctagaacaatgcctgacattcagtcggtgctcaataaatacatttaatatatgatgagccagactaattcaggtcctgagaaactggccacctagtggctattcaggtcacccagagggaggttggggaagccagccttacgtcctcagactcaaagacatggcagatcatcttgtactgtctttttccatcctgggatgggtgagaggcctccacattctcctgggagttggagcgaggcatccgtctgcgggccatcagcacgacaatgttgccaatgtctgcgatgtaggaaatagtcctcagagggtgatccatcataggctcctagaggtgaaaggatggggcaggtgagtggcatataggaccaagaacttaggagatggtatcttctttcctcacccaggctgaggatggaacccagcagcggtgggtcagggcaaagcccttactgccagactgagacattttccttggtcagtgaagaacaggaggtatgtacaggagaaaaacaagaaatatcaaacatttcatagcatgtagactctctggtgatgaagctgaaaagataaaatctaaacgccagtgtgtgtgtgtgtgtgtgtgtgtgtgtgtgtgtgtgtgtgtgtgtgtgtgtccacttttaaacaaggctaatgagtcccctttcccagagaactcattggagtgacagacaacacacatgttctgagttttcctttgtactttaagaagtaagtcacagtcctacctagcatcagccttttgtgaacaaagttctttgagcttgactggagtccagtgtgggcagtggatgaagtcctgagcgacatgagcatagttacataaaggatcccaacatctcagatctatggggatggcaaagccctcccttggtccatgtgttatgtgtggagaatgtagaacccagatttgtcctccccagtgtttacagcctgagactgctcccctagagagaccgcctactgagatgaaccaaacctgcctccttgttcagatatataaagtaaacacactgagtttctaggctgctgggacatctccatcacagcacatggtccaccagatctcagctggtgtgtgtgtgtgtgtgtgtgtgtgtgtgtgtgtatgtgtgtgtctcctttttcattcccttgtcaccccagtcaggtttccaggtcccatcacacaagttgcccaaaacctgggggatagccactttacaggcagggggagcctatatgagaatgccactagccttcaccccccaagaatggtgggagcaagctggtacctgtgtatctgcattcaacactttgatcctctgggtagaaatgaagagatccacctcagtcatgggctgagattcaccttcaggagcctaagaagaaaatgcatcaaaagcagttttattgtattaccttaacccagaggcatggggaaaggttagctcacacactgggttaccaagacacagtcaccagaacggcaacacagactcaagggttaaattgccaaagctgaaggtactacagagaggatagacacatgggcaagagttagcatttctatgttacaggggaatgtagaatcccctctgctgcttcccctacagcaacagattaactctggacatgatggcaagtggccctttctgcaagggttctggaggctgaagagtaagagcagctaactcatagtgaggaccctggaacagtcactcactcactttacactgccagagctgatggaagacaatgtctgtagtaggtacaaatgaagccactggatgcagttctggtaagagggtcttcatgttcacacatcaccacagcaacacagaagcagctgcctgctcctgcagccaccccgttacaaaagagcccccaatgcctcacatcctcagagtaatttacaaatacctagaagctctacaatccccaaagtgcagcctggctcatttagggctgaaccctgcacatgtgtggttattagcgagttttctttttttgcatccagcaatctgagaaatcctcaaatccaatgtattgcaattgagtagtcccaggcccctgcaatgatgtgtcattgctcctgaatggctgcagcttccacactagagggttcatttagcatctccaatctgctccctgacgttcctctgaagtgaaatgaccaaatgagcaacagaaaatggccacttgaggcaactaagtttggagaaaggctggcttatggagcgattcaaaacgaaattggaacaaaaaacttgctggatgcagaaaacaaaaacacgaaataataaaaaggaaaaacataaaagaaaaaggacaggcgtaacaccaagtgatgaagttgtttgtactgcaccttcttcctgcttttggctaatttctgggccgtctgcttagcatggaacaaacagagacaggagaatagttagaaagaggaactgacatgctaacactgcttaggggcataaagcatgtgtgagagaagatgggcttaagaaccccactttaagggcatgaaggaacttcttatgcttcattgtaatttgccgttttaaagaacccacttttggttctgtttattgcatgcctgatttgttatttcactgatttcagcttgcatttttatttctctctgctttctttgggagtgacttgctgaatttcctctcagcttttgataaaaagctacagctgtccaaatttttttcttccactaaagctttggctccctctctaagccctgctttagctgtcacccagttttgtgcactgcaatttctttactgccacattaaaatacttcagctgtgagttctttgaaccctcaaattagagttgttaaattaatttcaacatatttggaggttttctagctattcttttggcatcagttatgggatcaattttactgtggcctgagaacacactatttatgacttcagtctttttgaaaatcgccttaggtgttatgatccagcacatgactgacattggtgaacatatatgcactgcaaagtaagcgttctcagttgttagctaagaggataactctcatgtgggcttgtatgtgtgccttccctgttcttctattgacgaaggtgtgatgaaatcaccagctgtcactatggacttgtctttgtactgattttgttccattgatctttgtttgctctgttttgtggctgtgttatagagtgcatatgtatttggggtggtatgtcttcctactgatctatcatttccccctttttatctgcagcaataatttcctcttaccttttataagatgaatatagtttgaacctaactaaaatgaatgtatttctccctgtacttataattaaaagatgactttccaaatccaaataccttttctgatacctactatttgtgtgattttgagcaagccacttagcatttctatgccttagtttctctatgtaaaatggggattaaaatgatctaatagggctgttttaaaagataaaatgaatacatgaaaaactccaaatagagcactgagcattatgtctgtttacacttgaaggatgcagttcttcaatagtatgtaatgacatgttttatgtgaatgagagtcagtggccacactgtggaagatgttatggctgcagggtgggtaaagctgcatcattgtgatgtgtgtgtaaggctggacaactgtgatgtgttggagggtgtgtgaggctgcactgctgtgatgggtgtagggtggtaaagctgagctgttgtgatagttatggcaccaatgggtaaggctgtctagttgtgcttgatgggggtgggtaaggttgaacttttgtgatgtgtgggtaaggttggactgttgtgacaggggtgggtgggtaaggcttggctgttgtgatggagtggatgggtaaggcttgctgttgttaatgggggtgggtaaggctgtactgttgtgatgtgtgggtaaggcttggctgttgtgacaggggtgggtgggtaaggctgtgctgctgtgatgggtgggtaaggctgtgctgctgtgatgggtgggtgggtaaggtttggctgttgtgacaggggtggatgggtaaggctgtgctgttgttaatgggggtgggtaaggctgtacagttgtgatgtgtgggtaaggctgtgctgttgaggtgagtgggtaaagctgttctctcaattcctggggacttacctggtggaaaagctttgctgtcaggaatgcatttctaattcactagtgactcaactgtgttgtctgctttatcccactgtgggaactggatgatgattcagccatccaaagagcacatagttaattgctggtacactcaggaaggacgatgaccccactcccacacagcttccctaccacgaggtgagcaatctgctctggagactcctgtaggtgttttaccaaccacctgccagtgggtgtatttctgcatctgacaaggccctaagcggatgtggctatgtgccactcagatacatgcagagtgagaggccttccctggacgttctgacctgagtcagttttcttctgcctggaaacatctcctcttggatctttaatctgactctcttgaaatgacatgaaatggcccaggaattcctactcctgttgttatcaaaagcccaacaaaattcaactctagggaactgtcagcaacaaaatacccagcttctattcttttctgaaactacagaaagatgaagaagacaaactgagtttcatgacaggtattgggcatggttttcacaaagttgaaaatattttatgcaggtagagcaataccatcttgaaatcacttggatttcgaagtattctgcaccaaattataacatttagatgtaacattgaaaagatgaggagtcagtgcctgaatgagagattggaagaggctaatagacacctcgtaaggccaaggatggcagtaccctgggaagagctatgtcccttcctctcactccaggctcagtgtgcaccaggcgctcaccaatgatggcccctctaggttggtcccactgtggggagggctgcatctggcctatctattctttacccagctagcatctattgagttatggtcctatgccaggacccttctaactatttcacaggtcactgtcaaagctcatagcaaccctggaggcaggaactatatagtaagacactcaagaggaggaaaaaaaagcacagaaaggctaggtaattgtgtcatacagctgtgagcagcaggacagtgattcagacccaggcaatctagccctgcagtctatcctcccttgtgcagcttaggtagggttttcttctggaatgtctcagcttcccataaaatggggctaataatacctacctcccaggactccctacactcccggtctcagcagtgaacgagacaatagtatatgcataggcctggcaggtaccagcagcatcctctctactgatctcttcaagcaagctgggaagtgacacgcctcagacaaagcaacagtgatagaagaacatttaattctacaatgaaactataatttttgatatttaaaagaagtcacaaaagaatgggaaaatatgaactctgagacaggctaataaagacagattaaaaaaatggcaacgaatgatctgaacaaaaatgtgtgcaacacacaatccatcgccagcatttgtgatgtcactgcatgagcctcacagattagagtgagaatggaggtgtgtgtggacacccaaggcctctgtgccccgaggagtcgaaaatgaagtgagaatcctgggagaaaggatgacaaggaagctagcacaggcttcagtcacagtgccgagctgtgtggggaggggcattccagaacataaggacatggggcaaaactctccagaggtctctcccacaaatctttctaaggcaaggctgtagtaggcaacacaccatggtccttatagtccttgcttgaatgatatgagagctactgtttaaataatatggagggcattgctgtatggtaggaatcctgaccatcacttattactgttctattcacatgttttatgtcctcatgggttttctaactagtcaacagtttgtaaaactcatccccattgatgcattaactttctgttgaatcacttatgtttccatctttatttttgcaaacaaccaattcttggcttcactcatctttcacattgttttatttctgatctttgttattttaggtttagtttttatttttctaagtccttgagatacctcaacagggtatttgcaaagtttctttttttaatgaaggcagtcataaatgtaaccttagggtgtgtttactgcatctcacagttgtgttgtgttgtatttatttctattacttttatttgttaagaatttcacctatgaaatgtaatcaatgtcccccttttcccaatagcttccctttgtaatggcatgtcttttgttgttttgattttgtaacttactaagtcaaattagtactgcccatatgtgcacaagtgtggggtcatccattggagcatgggaaacctaccaagagccacactctctgggtatttgaataaaactggcctccatagactcaaatgtttgaatatttggtcaccagttggtagacatgcttgggaaggattaggtggtgtgtcattgggcgcagtctctgaggtttcaaaagactcatgacattctcagagtgctttctgcctcctgcttagggtttgagatgcgagctctcagctgttcctgccaccatgccttccctttaccctcatggactctatactctctgtgactgtaggaccaactaaacgttcttttctaagctgccttggtcatggtgttttatttcagaattagaaaagtaactaatacactctccaagaatgacttccctcctctagcagctatcaactgccgatgtgagaacagcattaattcactgctcagttcctcagtgagccactgctctgtgttgttcccacccctacgcttcacttcctgctccatctgaaatttcacttgttacctggtttctagctccatctatcactgcgatcagaaaggatctagcataagatttaaatgttttttaaatctgtgacataatacataatctgttccagagaagtcctaaactgaggaaaatgtgttctgtagctactgggtggattattctatgcatgtccaggaaattatatgatttataacttaactctggtattgatttgactttaggaggaggtctggatgacctgttcattaagtggagtgttgaaattccacaaaatttctgtattggggcctctttccacatgtgataatgtgtatgaaactggatgctttaacattaggtgcatattaacttatgattatatcttactattgacttgctccttcattattgagtcatgactgcctttatctcttcttaaagttattagtggctattcctaaagatagttactgctgcttattccaggatttcctttacctggagtgtcattttgcaactttctccttcggtttctgtgtaattacttgcaaagcagattactagcaggcagctactgtcttttttaaatccactcagcaggtcccttaagttttaactggaaaattgagtccatttacctcagaggctactgttgataggtaaggaatcatttctgtcattttgatgtttcatgggtatgtgacaggtgcatgcccatatgtatttgtatggtgtgtgagggtggcgggcactagacatcttcagcagtcaccttatatactgaggcaggatctctcaactgaacccagagtgctttgagtcagctagtctagctagcctgcttgccctggggatcctgtctctacttccctgatgctaggtgttcagacagacgattacatgggtgctcaggatccaaactcaggtcttcacagtgtggtgagtgctttccccagtgagccatctctacagcccctgatgattttcctttggttgtgggaatatttttgttttcttcctgtcttacctttgggttgactgttgcagaggtaatgcttgactcttctccatttgtcttttgtgtagtttctcttgtaaaaggatttacactttcacaggccttagtgatggtaattacctttcacttctgctagtgggtttcccttaggtgatctggttgtcataaataagttttgcttattttgtaaggtcttaatttttctccatttctgagacagtcttgcttggtagagtaattttggctggcttttctttgttccaggtcttggaatgtgctattccattccttcacggactggaggattggaggatctcagctgaggttttggctgcaattttattgagcatacggtagaagcgacagggatcccccccccccgccccccgcagcagattgtaaaattattttttagactttcaacagtttgattataatgttggggtgaagatcttttctggttaggtgtattagacattccatagacctcttatacccagatgatcatatcttacctaagattagaaagtctcctgatatttatttcatggaataattttcctgtgtccttagcaatgatatagatatttattcactttagagtgttacatttagttcattttttgtttgtaggaggtagtcttgctatgtagcccaggatgcccttcaattctcagtcctcctgattagcttccaagtgtgggaattaaggtgatgctgggattataaaccccctggctttcaaagataccaagtgcatctctttttttttctcttttccttccctgccttcttgttgtggatttttgtttttgttttagtctgaattggatattggaaacccattttcaaattcagatgttatttcttccacttgatctagtcttttggtagtctctggttaagcattctctttcattccatgatggggaatgtactactgtgtatgtttatcttattgattgttaaataaaatactgtttggccaataagacagcaagtagatgggactaggagtcaaagaggattctgggaaatgtagtagagaagtgttgatccaggcaaggagactcatatttaagtgaaggaagggtccctttttcccattcgcctcctccagcggcaggatgtgagccaccggcaaggaggaacaccaataaggcatccaataagataagtcttataaaatatatagatgtatgataattgagactgagctaaaagaatcctagtcattggccaagcagcattgtacctaatacaagtttctgtgtacttatttgggcctaactcgggcaggtggctggcataaagcatacacgtggtggtggggctcagcggtctttggcagaaagatttatcatggtgaatctgtcattcttgccctgctctgtattcctaatttcatttgatgttttaaatattctcttggctcttactgagcttgtttatatctacattttaaaattctttatcaggcatttcatccattttgatctctttggactttgttgctgaacagtgacatcctttgggacatggtacacttcttgtgcccctctcctgaggcttctgtatttaggagatcagatcccgactactcttggaggtggtcttcaaagtagtttttctcctgaagatgtgtcttatgtcagtatcaagtttgctaggcatttgactttatttccacatgggcactgtactgtagcctgcctgaagctttgttgcttacgattcatgactgggcactgtacatgctgggtcagagtcagaaagattattgtgggctatgtgagttgaggctgcattagcagcttaggcagtacagtgtcaacagagtatggaatactgcatggccagtcttaccatgggggccatggtacccaccctcttagccatgtgttttgagctactgatgccagctctgctactagtaaggacctctggtacatgcagccctagttgtgacaagggtcctgaaatctttcctttggctcagacactgtacagggagaggatgatggaaccatagcccaccctgtatggtgattatatccagtcctgacggcacttcctatcagacaaggcatgaggacatcgggaagtagataggtggggtgacagcatcagctggcactctcttatgctggctggcttctgtgagcctggcctggagtggggctgcagcccctcctagccctgtatgtagagggacaagatgatggctggggccttttgcctttcttttctacttctggactcctgcgcgaggggcagtaggacctggcgggaatagggtcagcctccccttaagtctgcacatctggtgatagctggaatcatagagctgtcacaggctacctcagcacattctggtgggcagagaagtggggcatcatcatgtcctgtcagtgcaggcatcttgagtgtgaatcactttcagttctggtacaggatgagtcctcaagcagatcaccatggtaaatggtcctacaggacccccatcctaaggggtcaccatctgttccccaccatgacaaagtacctaccttaagtcagttactctgatgggcttagttaggttattgaggcagctacacactgagctggggcagtggtatgtgtctggggtctcagagatagaaatatcagaggtttcaaacccctagattagccctaattctgacaccagctgctttctgaaggcaaaccccagcaagtcaggtgtggtgttgcatcctcacttgatcccaatctagtaatcaagaggccagataattggaaaggaagcctggctacataagcaaaactctgcccgtggctccagaatatagcatccccggtgtttgctggtagatgatgtgagattctgttgtgtagtaaagctagagggcagatttcaggttacttaagtgggactcaagtctgtgaggacagtcagtgcctgcaagggcaggccactgggtctctccatttcactcttctgcaaagggcaaactagtctccctctcctggctgtgtttctcttactatgttatcccagacttttgaaccctaacccagtcacttagttcaaaatacagccacacactctttacttgtagttcttgtttgtgaaggaaaagtgagtcccggacaactatgttcagccatcttagaaaatcctttctacaagcttttaacaaggaaatgaatctggaaaatatccagagactgagtgtttcatgctcttccttgccaatggagatgagtggcaagtacttagcttgactagagtcttgagattacagttgagaagatgcttcataatgctttcaggcaacaatttataggccaccaagcagagtagactcgggagctttccactacagactcttgggtctcactgtccaagtatctgactcaagaagtctggggtcaggatggagagcttgcaagtccatcaggtttctacacaatgttggcctgctggtcccctggaccatattctgagactcgtggttctcattcatatctaagtatgttgttgatgatggtatgtgtgcgcgtgtgggcgtgcgcaaggatgcacacttcctgcaaggagagtatttcttctaacagatgataagtgacaaggccagaaaggacacatgaaggaaccaaccaaacttggggaaagcaacatgaggggaattctaattctgatgctgctgttgagacttgctttattccttgtatcttgatagatggaacaaagttttgttttcagatacttcagtttgccatgcagtagtatcacccaaacagtctttttgctccatttattggagtgccagtttttcaaggtttaagactgggtgttggttaaattttacttctacagtgactatcacaaaagtctctatagaaacagctttttaaaccaaagtctccttcctccctccctgagtggacactggaattcctggccctgctatactgtattctctgtgctgaggtagcctagaagaacttgttctggaaaggctaagcactctgtagaaagagcatagtacccactctttttgagagtggtttctcctgagcccactggacttctggggatgcatcctttctctgcctgccaacaaatctgagccggctcccaacgcagctgctttccaggtgggatggactacagagtcatctctacttaaaggctttgggttgtgtgcagtgtctttctgacaagcatttagatggatataaaaggaacacgaagcaggaaatatttattgacaggcaagcagttccttccagcatgcagaagcacattgtaaaatgatacttataagctgtaagagaaatgtaactatttaattttaccacttttcagtgaatatctcacactacatcaattgacttgtaaaagataaatgcatgtttttcaaatatccactctactctgggcaggtttgaaacatatttataatcagttggctacttgctcgttttgaaagcaccatctaattttacatttaagtgagctctgggatttctgggtgctggctgattgggagcttcagagaaaaggatctgctctttcatgagggagctggacctgaaggtaaaaccacactgtcagccctcattacgtaggcaggaaagcagctgaggacatagcagtgccgtggagtggtgagggggatgctgctgctgctggcctgccactgcccttccccagtgccgcaagagtggacaggcacccatctgtggagtccaaagctatctgtgaataaacaaggggtcccaaataaagccagattgtagggcctgattaggcagaacctatgagaaactaaccttggggtaacactcagttttctgttgcagaaaatctccagtaacccttagagtcagaatgttgttttggtctagaaagaaaacttctgacacaattctcatgtgtggctttgttccggatggtttcagagtgtggaacatacttggttccaacccagagatggctcctatctgtcaggcagtcatcaggcaagctgtggcagatctctgtaggatggttacccttggggaagctaatggcaccactcactcaagggactcaatgctatatgcttggcagagctcttccccttggagtctggattaagactccctttgaaaactagcttgtttttcttaagagatttatgtattatttcaagagctgtgctggggatgtattaaattaagatggagaagaccatggggtgaagcaaacaaaaggaattaggccaactgctgtgacctggatctggaatgttctctcaaagatccaagtgtcatgtggtactgtggtactgtggacatggtgggacccttaggagatgggtctagtggaaagaagttacgttattggggtcatgcccttgaaggggttattgggtccctgactccttccttactctttgtttcctggccactatgagatgagcagcctcctctatcatgaactctccaatgttgtagtggcccattcctggcccaaagtaacacaggcaagtgactttgagctcacacctgtggaagtgtgaacctgttttcctttgtttatcttaagtatttgtcacagcagtggaaagctgactaacacactagggcagctcagcaagaatccagtaatgttctactgtcagtattacctagtttgaaaacccagacagtttgaaggtcaaactgctactttgttttcatggtatcctgttggaagtcaggagcaagatgcatgtctgtgagtagaagaagtgagtcagtctctctctctctctgccttttgggtgctgggattaagggtgtatgccaccaccgcctggctagaaggagcttctcttaaaagaaccaatcctcctgttttttccattattctgggagaggctcattttaagataagacatgcaccttatggaagggccatcaaggctcaggcaaggtgtctcagatgaagtggctgaatgggtccctgacatgtggactgtcatcagtgttgtgacaatacccacgtttgaggcagctgaaagttatcctctgggtcacacaccttaattcctcacatatccttggtgacttaaaagtcacagcttactgcatgtactatgggtagttaagggagaggtgagctgcaagttcaggagagaactgtttgctcttccaagcgaagttatcttaggagcgactgacattgggaagctccagcagaaggtataatggaaagctacttgttgatgaagcaatgcgaggaaggagagaacatcatagcctcctggggaaatgcagagtgagtgggctacaactggcaaggctgccctggacctgtgagctcacattatgcaaccaccttcctcagatgctactcgatgctgttagcgctaggtttgggtctagcaggtcagttccttcttatcatttttttctctttccccattggaatgaggatgttagtcactgtatgttagaagtgtttcacttgcttttctcaggggctcagggttgagtttgtctagtgtaccgggggagatttgcaaaggtgttaagcacagttacatcctcatttggatattaattacagagaagagatggatttatgtcgacttgattctcggttgatctgagagacaccaagtagcaagcataggtgtgggtgctggtaagggtgttgggagagaggatgggcatgcagttctgtctccgtgaggtgagcagcactgctccccaagctcttgggcctcactgctctgcttcattacccccccccccaaccacacccaaccacggctagctgtggactaagctgaaaccataagccacaataagtctcacttccttttaaattgtttcaggtcaggcacctccctcttcccttttgcctctgttggggttaaggggaagggactcacttcaactgttaccctcccccacagtcctacataagggagtgctcagggattcctttctttgatcaactgccttcccttgtccttttctcagtctatataaccacaccagcactaggctgtatggcatcgaaggagaggggcagagaagactcagttttaagcagcggaaactagaaagaataaattagtgtatactaacatttcagttttctggctctaggtttaagctgtgatgcaggctctctgagtgtgtttcatctgacagcacaagggcatttggatagcatgaatgcagtgtccctgctactctggtggttccatatttctaggtggtatgatgatggagattctagaatgccacatttacaggctgattttgggtggctcaatctacttgtgaattattgaaactagatgaaattggttcttgatatatccaattggctgtctcattttaagtcttgagaaaactaatttaaatagctatgactgtgacaaaattaatttaaataggttatgactgtgttcagaatagtttaagctgggatttgcttgtcttcctcagactactcaagtaagatttggttgttaattttcctggaagctggaagtaagacagtttgaatagagcctaacaggactgctctgattagtggcctctatctagttgtcagtagaaagcctgtgctggaaccttgtcttagaggcctaaagagcaaagtccatggccatatgtatttattcttaaaatcaacctgaatagtgtttatatgtatagactcaggcttttagctaggcaggaataagccctgcttgcagcatcttagtctactctctaagagctatctatgggctgatgttgttgactgatcaggtgtctccagccacccacctcccctcagaccatgcagaatccctcaccttgatccggcttactgcttcctgggcctgcatcatgcgtacatttttggagggagttttgtctgagagcagctgagtggagccaaggtaattggcagcaaaaataattccatcaatcaagtcttcaggatcacaagggccaggaactgtaacacatagagtgaaagttgtcatgggaggataccacaacctggatgttgcatgtcaactcctaagctcactgtttaaatatgtggtcaacctgctagtataagatatcttagagtcatttactaagagaaatcatatatttacttggatatgaatcaaagtccaacagtaaaaaaattgtgtctcttagccaggcctggaatcctagttgcttgagaagctgagacaggagtcctgactgttcaaaagtttgcctatagatacttgcctgacatgtgaagccttagatggagcaattccccactcccccagcttagtactggggattggaacatgagctctttggcaacaagggtcctgccatattcatctttggctttcatgcctgtcatgtatgtctataaactgtatgtctgcttgggtaaatggttagaggaacagaaatctgtggtaatggcaaacaccatttcccaacacttcctatttccttccctgtttgatctgtgatggaggaatgacacttcatacatgaggagaaaaatgggatatttctttcctataatggcatcagactccaactctgaaaatcgacagcatcaccgcaaaaccttgctcccatgctgccaatcttgtcaactgacagaccatgaggctcctagcttcacattgagatcaatcccaattctcttctcactcactagtccactaaattaaatctctgttttaagtagagggacatctgattttaatcacaatcacctaaaatccacactccaaattaaagcatgtctgtaactgttacatataacagattcacaaaagacagacatttaaattgcaagtaaaatatgtattttctttgacttgaatgacaattctgaggagactaaaacataacccactgtgaaacctcaggttctagaaatgaaataacttgaggtggaaacaatttgctttccctcttgtagggctaatctgaagtggtttttttttttttttcattttaatggtctagcttgccttgagtttcaccccatgagaagctgctggccaaggtacaaacttattcacttttcaacaactaaggctatagtcaaaccacagaaatgagcagtttgtcaggaccttcatgatacaccggggcatagctttacttcttgactatccccagcctttattcttggtctgtgacaagaacaatgattcacagtaattttactgtaagtctaagatacccagagtcagtaactttgtggtcttccccctattttgttttacatccagtgccccaaaatgctaaaagagtcatgagtgaccccagtactcaatattttctcttcagctcttaccttcaacgtaggttgggaatgaagccaagctttttcttgactgtaattaagacaaagaggtttcaaaaagggcagagcatgatgaaatatgcattagcacaagcgtccatgcaacatgaaaaagatatacatcaccagtggcatttgttaatcagttatcgaccagttttcattagagtgaagtgtggataaacataagcatttactattaaggttacctaaaacccagaattgccctctgaagtgatcaaaatccccctacatttcagagaggtgtttgccagcttttaaaaaagtataatcagcaataaagactatgctgtacattttaagaaagtattcagtgtgaaaaactattgattactaaatgcatcaatagcatgactgtgtactcttgagagtaagggttctctggagagtttatcctttaggtctttgacacagggtatctgttaaaaggaaaataaactcttgtaccttttaatctctcactgattcattttagttgaaaaattccatattctgtaaatcatgaatttgtgtttctttgaaataagaatacaagattaagtttaaaacactggcacttctttatgtgttggctcacagcagaggtcggccttaacagcactgttggatggggtgagctagataccttctagaatctggctggaagtttctacgccagcatgctaaggagcaaagcttgccacaggctcttttcataagcacatatgctccaaatggctctccaggagagaagaggagagaattcatttctgcttcatatggtatcagaacttatagctgaaatgtgtggggcctcagaggacagctcagattcaaagtaagcacctaaaatgggcaaaaggtaggatttacatggccaagatttactgtcggggcatgtgatcatttagacatgctttttggaggacatctgttcagtacattgtcctgctagatgacaatatgcactggggtacctgatgggctagatgagcaggctgtgggtgaggactagggtgtcactctgttactatacagagcattctatcattggcatgctaattgtttcatgttgaaagctggagcatctcatcattcaggacagtgacaggaattccacactaattgcatggtagaccatatagggcaactctcagtaggcctcctgcaaatgtgctcactgggaagaaatggcaccttctgtcaaagaaattgggtctcttgggtaccaagaactgaagttcctggctgctagtgcatttgtggaaaacagcacagcatatgaggcaaggtatggctaggacacccatgctctcatctggagagctcatgctatgttagcttcttcacagaggccaaagaccatttcccacccatctcctgcccttactctcagtgtttgggggtgacaggggggcgaggagaaataacaggaagtcacttagcatcatcaaaatggcttagtcttcaggcacctttaaaaaaacagattcagtgttcttgggctactaggacacttctctgaatgctaaaacccattttagcagaagctacaggagaagtactttggggcagtttttcaggggtcatctgaagttggtatagtccatagacatgacaactggaagtgtgacctcacacactttccacaccaggtgcagtagatcctggcagttccaaacctgggccaacaggacttcacattcagaccacagctggccacatgtgagctgtgtagctgaaggtacccaagctctggctttcagaactaacacatgagaagaagagtgatatctattacccagaaccactgaaaggctccgtgagagtcagcctggtgcctggaataccacaaatgcttaataaacataatgtctgcttctgttgttggcactgaagcactcactcttcccttcttacccacccatgtgctatgaataaagaaagtatcaagtaatggcaaaaggggccagcaggaactatgaccccatcacttatgttccagcggcagtctgtgaacagactagataaggataaaaatctatatttccctctcataaataggacacaatctgttattcaggtacaaacatttctttttctgttcctagttgaatttaacataaaattgtcagcacagtgaaggagcatgagacgtgtgacttcaccatcttaggactgatgaaggagcatctacagctggttccacttgtgcccacacaaccactgtgcagggaaatggtcacctggtgtggacccccagtaggcagtgcccattgctttgggataagaggacattgggtgctaaaggaggcagtggctctactcagggaagaacacccacccttttcaagccccagaaatcatatctcatgacttaagaactctgtcagagttacgtgtgtcccccatgagtgaggtaaacacagaactttacaacctccttgttgagtagcttctagcctatagttaaaatgagaattttagttccccaatcctactggccatgtttcaagagttctatgggcatctgaggctagtgagcacccctgacaatacagaagtggctcattccacccacgcagaatgttcttttggaaaagatgctggtagacagtttttgaggttcaatgtccctgtgatacaagagttctgtaacttgttgcagatggcactggaatgcaagtggtatgtatgcccaagggtgtgaattctcatgttcagtaactaccagacacctgtggccagtgattaccaaacttgatagatcatcatggctttcactgacaatcttcacacatcagagaggaaatatatatccttgggataggtggaggtgaaaccaataaagcattattggggtgaagcaaaataggcatcaggaatgaagatggtgccctacctctttatttgtggaagcttccgtggggtcaccgggatgaagggctatgcttgatgactcagcacccaggggtgaggaactgcccggagaaggagactggaacacagcaagagggacagacagcagtaagacccaagggatgtgacaacaagtaacaaaaacctagaactgccctgaggggacactgcagtgggagaagcatccttggcaagaactaccaaccacatttagcagacctggccgtgcgagttctcaactctgtctcttcaaaggagttctatagctttggggctttttctccttcccccattgggctaacattttataggaaatatggacttatggtgtgttatgcaatatgttaattttttcctagtgaaagttacaaacacttagaatacaaatgtttaagtcacctgtccaaggccatctgaatggaaaactcaaactgcccattgtattgtccatgtcagctcagatgtctatatgttgtccctattaattcataggccactgaaaattcagacatttcaacattcaaaccacactgttttggtgcatgtcagcatactttagagatcctttgtcaaatgacaggcttggaaataaggcttagaaaaacaggtttggggaacagggtccctgtgttagtgtgatagtgtcttggtgggtgggtgggcatgggcaggcgttagtggtggacatgaaaccttggtttgtgcacagaacacaagtacccccccccttagtacttgctaaatgaatgaccaaaataagcaagcctggaaatactaccatatgataccagaaagtcctgtgtggtcttgaaatcttgggagatgaggggcattttctggtgggcctcacagatggttaccaattctgtagtgatggcatcggggtgcaagggtggggtaattcccagctgtgggtgatagctctgagaacccacatgcaacatgagagtaatcatgcaggacttactctcccagtgtggggatgagagactaggcagaggcaggcagatctctgtgtgctcgaggccagcctggtctacaagagcgagttccaggacagcctccaaaacaatacagagaaaccctgtctcgaaaagccagagagagagagacagacagacagacagcctgggcagcaaatgctgaccaaaggaaagtaacacccgtgcacacctgactttctgcacctggctctctgcggaagttaggtacaaggcatcaggagaatatttttgcacaggaagggaaaatgtttcacagtgaagtggtgctgggggaaggaacagggcatgtgaacacacaagagaacctcagagggcattattgataactggggagaaaacttccaaaaagcccgaattacaagaaatacagggaacaccagaagatgacacagtgaagagcaatatttagctaagaagttatgtgaccacagtctctgggcatattattgcttgattctaagcagggaggctagggcccaggagccccttacatggtgagatggagacatctgtggccacagtcaaggcaggaggacaagcataaaggtgacagcagatacaaagtatcccaggccccatggctcctggccccagtgaagcagccttgcatgcctttccaaagaagcacgcaacattttccagccattgcccaagagagctgctggttgcagaaagatttagtactgtttggttgactcaaaattaatgtgggaaaggctgagaatttaatgccttgaatctctccagtttttcatatcaaaagggcttcctttgatatttgtggcttgatttgtttccccgaagtaattttctctgtcccaaagactttaaggttccctctgagccttagggaagccactgcagttgggttttcttgaactgcttgcttttagggtcatggacatcttcatatggcactccctgacagacagcctcatatttcccatttctttattttccactccaatattctacaaatagatttcttaccaccctgtgggccctggactgccagtcagtgatgtgcaaagacaggctatctggacaatgggcagggatgtggaagacggaacccagacccataaaaaggtaggtgtgggtagtgcagggtgcccatcagggaatggtgggcataatgaggacacgagtctgctggtcactcctatggaatgtgctacagtttgtattataacttgcttatgtgtatgcctaagccccaagagctcttcaggaggaggaatcttggctccattatcatacaggtgcctaggcttagaacttcatagtagttagggacttagcaatgggaggcatggacagatgacttcagtgtagtaccctggttataccacttccaacctgccctgaagatatgggacaacactgcccactgcctccctgggatgatctcttttagtggtcagtagtgagtcctcctctgatgtagtacccctcagcttctctgtgtagaacattaattgttcatcttgacctctagaaatctctttttcctgtgaggactctaacttgggctctagtgaagttcttttaacacacagagctacaaattgccacttgctgaccaagacaagcatgcacaaacaccttcaaacagacctaacccttacaagggtgaggcaaagttattcagatgcctgcttcaaaatcttctgttaaccttcaacctcactgttgtagaatattattttaactgggaaaagatgtgttccatttgtttatgctggggaatattattttgactatgtgaaggtgtgttatatttgtatctgctgcctttgttaatgttgtaaacatgtgctgcatttatttcaccttgcctgcctaaggcatctgattggtctaattaaaaaatggaacagtcaatagctagtcaggagagggataggcaggtgggcagagagaataaataggagaaatctaggcttgagaggaatgagaggaaaaagaagagaggaaagaatgagggagaaaaagggggagatgtccagggccagccaggcagctgccagccaatagacacagagtaggacacacaaaaagaaaggtaataagctccaaggcaaaaggtagataaagataaaccgcttaggttaagttaaaagagctagccagaaaggagcttaaactaggctgagccttcataactaatattaagtctctgtgtcatgatctgggagctgattggtggccccaaagaaaaagcctggtacacatccctctggtaaaagaaattggataatagctttcactttcatcatggcatacctgtgttagaatcttataccccctactactgcatgggtattcaaacttaggcaaatgagaataggactaggaagcaaagttggatttgataattcacaaaatgagggccagaacattgcttgtaggtgtgccatagatgctagtagccatgtgcttatcttgtggtgccaaggcaggccctactacatcctatggctccacatcaggcctagcatctcccactcattccctgagaatccaggaggtctccttcatgtggggtggctgaagagggagtgttgctgctgcaatccatccttggaggaccttaagacagcatttcctccccacatccaacaccaccaaagctatggaagctgctactgcagcctctgtgtattcagggatcaactctgtagagtcccaagacacatacagaagcctatgtcatgaacccatataacacagacattgctgacattaaaatcaaagaaaaatcacaaagattgctttggaacccactacagacaactcaaaatcaacttaacatccaactgatgccctatatatcactgaaacaaaaataccttttcctacaaaagctactttataaaatttgaagaatgttacaccagatgtgcagacatcatcaagatacaagaaatatgaaaggaaacaggatgcttgcaagaaaaaaataactgtctagaaatagatctgtgtgaaagaaacctatgaaatgcctgaaaaaaaaaaattaagcaacaatcctaaggaaacccagtgagataagcagtagaaagaaatgagaaaaacgactctggatgtgaatgagaagttcaccaaagacaaaaaagaaccaataagaaagcctggaagtaaaacctccaactggtgacataaaaaatacaaaggaagcttccatatcagccagaagaagaaattttagaatttgaagacagctcttcttaaaagccactttataaaggaatggaaaagaatgaagaaactctaggaaatgttgggaaaccattaagcaaaaacacatgtgaattgtgaaaaatgaagatagttaatgggaaagacactgaaaaatatttttcataggaaaatgcccctgatgctctcagatctttaaagacctagggacaatagattcatcaaaacagacccacactcagagcatgtgagagtcaaatgacaagaacacacaacaagaaatcttagaatagcaagagaagatcacaagtaaggggacatccctcagactcacaggttgcctcacagaagctcactgcctgcaagagaatggaggagaaatcactgcctccaagaattgcagccagacacattacccagatagatcacagaccagtgcagtaaaaagttcttatgagactctattgaacaaacaaaaggattgttactgccatgaagacaacggagcacacacaaagcttagcagaaggatgggtgcatcacacacacagaactaaacctcagcaggacagaaagatattatagatattataatgtgaagagaaacaaaatcaactaagtgagcagtgtgcaatttacaaaatgacggcaggagacttgagtcctgaacattacaccagtagcacagacactgagatctacaataaatgggacctcctgaaactgagaagcttctgtaaggcaaaggacacagtcagcaagacaaaatggcagcccacagaatgggaagagatattcaccaaccccacatctgacagagggctgatttctaaaatatacaaagatctcaagaagctcaaaacatcaactaatccaattaaaaatggggtacagaactaaatagacaattctcaatagaggaatctaaaatggctgaaagacacataaagtgctcaatatccttagccatcagggaaatgcaaatcaaaacaactctgagatactatctcctgtcagaatggctaaaataaaaaacaccaataacagtttatgctggagaggatgtagaggaagggggacacttctccactgttggtgggagtgccaacttgtacagccactttggaaatcagtatggcgactcctcaaaaaatgggaatcagtataccacaagatccagcaattccactcctaggcatatacccaaaagaagcacattcatacaacaaggacatctgttcaaccatgtttatagcagcattatttgtaatagccagaaactggaagcaacctagatgcccctcaactgaagaatggatggagaaaatgtggtacatttacacaatggagtactactcagcaggaaaaaaaaaacaatgcaattttgaaattcgaaggcaaatggatggaactagatgaaaccatcctgagtgaggtaacccagtcgcaaaaagatgaaaattgtatgtactcactcatatatggattttagatctagtgcaagaagtagcagcctacaatccatactgccagagaagctaggaaacaaggtggaccctaagagagacatacatggtcccccggagaaggggaaagggacaggatctcctaagctaacggggagaatgaggggagtggagagggagttaggagaaagagaagggcatgagggaacaggaagatctagtcagggaaagaatagaggagagcaagaaaggagataccagcatagagggagccttataggtttaaatagaattctggcactagggaaatgtccagagatctacaagtttgacaccaatctgataatgagattgatgactaccttacatgccatcctagtgccttcatccagtagctgatggaagcagatgcagacacagctaaacactgagcttaactctggaacccagttgcagagagggaggagtgatgagcaaaggggtcaagaccaggctggcgaaacccacagaaacagctaacctgaactgttagctgatggttgctcatggaccccagactgatagctgggaaaccagcacaggactgttccagaccccctgaaggaggaggtcagtttggaggtctggacaatctatggggccactggtagtggatcagtatttaccccaagtacacaaatgaactttgggagccctctccacatagagggatactctctatctgcctagacacactggggagggtttaggccctgctccaaataatatgacagaccttgaagatcccccatggagggcctcaccctccctagggaacagaaaggggttgggatagggggtcagtggggggcaagggtggagaggagggggagggaactgagattgacatgtaaaagaagcttgtttctaatttaaataaaaaagaaaaaaaaaccaaaataatgggaagttcatgcttcttagaaacaaccttgagtgtaaatggattatattcactaatcaaaacagactgcatgaatgggttacaaagaaagactacacacttactacactaaactcacttctctggtaaagaatcactagactcaaagtgcactcttagaaaataatatatctcacatgtgaaaacatgaccaggcaggaataactctagtggtagttgatgaagcagaatttaaatgaaaatgtataaaagagacaaatattgtcatcccatattgataaaaggatcagtttacaagaacataaaaactataaacatatacatccaacacagggtcaaatcagatgctcttcattggataaggaaaaaatgtgatatgtttatactgtggtgtaatgttgagccttaaaacgaacatggttttaatacggacagaactggacgcctttgaattaaggaaaacagaaaataccacgtcttaactcatctgtggaaatcaatgatgttaatctcaagaagaacagaatgaacctctggccacaagagactgagacagacagaaaggtaacaagaagttttcaatagggacaccaaaacagagtggaggaatcactgctggctattctggagttgggtaactatgggttaacatggtctctaatgcataggtgagtatgaggtccccaacactcaatgattaatggctgaagagatgtaaaaacttattaccctagtttgattacactgtgtatatgtattaaatcactataatgtaacccacagagaaacacaaataaactcactcaacaaagtttacaaataatatacaagagtaagattctactaagattctgatgatcccaggaagatggtgccatctaacagaaagcctcatgcaagacactgtctcttgcttgggaaattaattgcacagatggagaggattatgaacaatactttttgtaaaatctttgtaaaattaaagaatatgactggttcctcctaaaattctactttgcacttttcacctaaatttagaagaaaaacttttcacttacatttagaatacaaaaaggggggttaagatatgctaggtagctggtcagaaatcagaagacttgaaggccattgaggagagactctcccttgaagcccatttcctttgtctctgtaacacttcatttgaggaagaaagagtatcaagattgttcctcagtggtttgaaagaaaatggcccccaaagggagtagcactataaggaggcgtggccttgttggaagaagtgtgtcactgtggggtgggctttgaggtctcttttgctcaggtttctttccctcaatgtgacagtcagatgactccctgctgccttctggtcaagatggagccagcatctgactgactgcatgacgccatgcttcccaacatgatgatgatggactgaacccctgaaattgtaagctgctatctcaattaaatgttttctttgtaagacttgctgtagtcatagtgtctcttcacagcaatagctaccctcctaaagatttaaaatactgtatgaaagaagagaaggcttttgttgaggccattaaaggaaagattgtctccctaaagcatggcagttttataggtttaactttaaaaaaaaacttttcggttacatgatggcttttttagtaaaaaaacaaaaaaatgttggacttggtcagtattatgcctgtacttcctacacatggaaggcagaggcaggccagctgtttgtgagttctgggccagtttgttctccaggccagtgagggttacaggttagaccttatctcaaacacaacaagcaacagcaagcatacattggagtctgacatgatttacacctggcctgaggtgaacgcttaatattagaaactgtccaaaagattacaaagatatactcttgtcccttctcttaaaagttaatctaaataagcatgtcaatcacctggacaggaaaattcccccaggaaagctacaccagacttcatgatacaccagaaggtatgctgagttgggaggaggtatatctatgcccttaatgagatacctactacacagtttccagcaatagcttatagactttaccaagcctggcccatttgagttctaactccaactgtgacttcctttccccgtgtcgagctctccccgttttggataccagccaacatacaacaagccttcctgtcttgacactttaggttttctcattctctatctagagattgccccactctccaaatgatgtagctgcttgcaggcctacattgctgagcctgtttgctttcttgacctctaactcaaaaagcatatatgtttttctttctcatacctacctccctcttcctgacagcagctaagagctccagtttgcctgcctttcttttcctttttctcttaaacgccaataacattctttgagtttccttactaaccctttaaaaattatctaggaaatgaaaaacctgcaaacaggaccctgtgttccccagtgacagactgaatgtaacgctatattcatacatgggcaacttaaaccctaactttgaagtgttgagggtgagacccctttgtgagatgatcagactaccaactaggggcattgcctcaatcagattggcctgtggggcactctcttaactgctagttgatgcagggcaggccatcccactttggatagtactagccctggacagggggttctgggctgtataagcaagccggctgagcagaagtgagcagcattcctctgtcatcagttccacactcctcattgatggagtgtggcctgggagtgtatgataaaataaccgttttatcctccaagatgctttgatcatggtgcttatcactgagacagaaatcagaacagaacagagttcactttttcttctgcacatgcttgccttctcccatgctctcacatggcatacaggaccatggcatacagggaactgtgctcaggacttaacatccagaactatgaagcaaacaaattattctttataaatctccaaccggcaatgttgcttttagcacaaatcaaactaagacaaagccacatgtggaagggtgatgacaataagagcagaatcctgaaagaacaggagtgtcacatgactaaggaaggcccttagaaaacgctgtcactgaactgtccataatttaaaagctctttctgctcatgcgaccaaagtcacccgtgaatagagaaggctatttgattgtgtgcttcaatgacttcataaaaagtaaattgcaccccctcaaaccaataccctaagaactttcacgccagctgggcttcctgtcatcttcagggggtgggtcagaactgtctttcccctttctcaggaagggtcagagaggacaggccacgtgcccagcctcagggttgtgagcagggagaactgaatccagtcagtagtctattagacaccagggcttgagaatttaaccacttgtcattctaaaacacaaaatacgctgttgtgtgtttagccgtgatataagcaacaagatcttgacctgacagctgtgatgagagcccacctgtgagaggaagcagaggctgcacaggctctatttctgtcacaggacccccaagcctgtggttagtaaagcatacatcatttaactcacacgaaagtagactgagtcttcaaggctcccgagatgggactctgaaacacctagagtccatttttataaaacattgtgatcatgggaacaacagtttacatttcccccttgtaaatgactatgttgttttaatttgatatccaaggctgaacacacaacagtgtatttggtgtttcgggattataaagtggttaaattctcaagccctggtgtctaatagactagtgactgaattcagtcctccctgctcacagctctgaggctgggcaggtggcctgtcttctctgacccctcctaagaaagggggaagacagttaagcctggctggtgtgagtgtgcactgatgggcagctggttgttgggcactcaccgagtatgagcaattttttacaattccaatctcacattttttttttctcttaggttcagagggtcagcacagccatggatgctttcttggtctcattttgtttcttcattaaaaattcattcatgaataaagggaaaaagcaagcagaaggcactataaaaccacaccacaaagactacattaattcataagctccaacactttaacagcatattggtaaaaatagctcattagtggctatagctagggggcgggtatctacaactgctgtgtataacttctagcatgtcggctgttttccatgctagaaagctctccaggatctgaaagttgaaaatgacactgttgagagtgattgatctacaaagacacacccacctgcctcactcctattaattccagcacagcacagatgaccccagtatgccactgaatgaggacacctatcaaagatggctgctagctctagctagccttcagtcccagtgaatactggtgcctctcttccaaagaaactcagtgacagaaattcatttcagtgcagggagaaagtaaatattgaaaacttacatactttggtcagtccacctgggactgagttgcttattcatttaacctatagtgaacaactcccagagacatctggggttacctttctgttgcccccgtgccccccatgactaaggagccaatatacctactaagagttcacaagccttcttccccagggatctattttctcttttcataaaaagctctgggcaaaccagtttcaattcaagcctttaatctaccttctttgcttggagaataggtctagaatacaagaatactatcttagtacttaaggcaccctgaagttcggctttaactccttcgttcccctcagcactgccaatttgttctaactctttttcactaagcctaacagaatcctgtcctgtttccagcctatgacctgcttgtttctgctcagtgactttattctgcccttcgtctggactctagatatgcaagggcctcaaaaggcctactctaaatattacgtctcctatgcaatcttcccaatcctcttaggtaagaggattccctcttgaatggcttgcatgaattttactgtgccgctcatggaatgcctgaccttgtacattataaaacagtactctggcatagtatttcgataagtacaacaaaggcaggatttataattaatttatgtttcctctccaagtacctaagacaaagaccctcgtaaaatgtacaacaggatttcagaatgtgtgatgaagagaaaacacacagacacctatatcacttgaaaaagcaaatgaaaatgagttttgtatctcagggtaagttctggagacacacatggttattagtgcccatggctctgtgctccttctggatgatcctctgtcacccttgcttgcatatcatgcaccctctcaagattgggatagtagaatggacaccacagcaggcagcagtactctcgggagtggcttttacatacactgtaattgagcacttggtcatgcgatcctttccagcatgaacaacattctgcttccaccactgttctacatgggatttcaaaggtgtaggcacacagggcaggccgtggcacatgccccagttctgactttgttttgagactgtgggggcttctgcctcctggtgttcccagatggcactccctgtatgtttagcttactggcttacctgcctttatttcctctccccaaacagtacacaccgtttccctacttgtctgagttgcttcatattaaccttactccactttaggattattttgataaaacccaaatatgggatgagtttttttttttttttttttttttttccccaatgcacgttcacacttctgaatttgaagctgattaagaagtgggtaattatccactctatagtataattcaaacaatattatcaatgcacatttgtatttccttaatgtggcaaagcagtgaagtcagtataggcattgaatgagcataattatgtcattaagatgataataggttgggcttaatgaagtgttttacatatacatccataatggattcaattaatactggtggaaaacttgcagagaactaggagttaacctactccaaccatttctgttctctcttttcccactgacatcatccttcagctcctgtctctaagctcataaacctgtgtggaagctgccaggaccccagggagccatgcttggcagtgctcagctcagggggtgatttcctgggatcaacataaaaattccttgtttttttttttttttttttttgctaccatcacaagagctctaagcttttgaggccatgttctcaaggcaaaccattaaccagttaattataaagcaaccatcagggtaagggtaaaccaacccaccacctagtaaagctgtatgtatggacagggtatctagctccaaatagcctctcttgatatatttgaaatcattaaactgggcaatgagaaagccttttgttcactgccctttccagtccattcattccttgatggacccctcatgtctttccagtcacttgcctaggctgggagcaaaggccaggcacttttaacttatattaagaaaagcaactgagctgaatgtaaccaagccaggtgtggttacacttgagaatctgagacagtacagacaaagggtttgagaattccctggactgcatggtgagttcaaggctggcctgactgtatagaaactccctgtctcaaaccaaagtagacaaaggaggagatacagctaccctcacaatttatattagcacaacatctgctagaaatagcaacagccaccattttcaaaggacttagtgtgtgcctggcaccatgcaggggcacatgtctcgttttccagccaggcagttatttgtgcacaaagcactaatagccatcgatatgtgtcagccctcagcagtgaaagacgctacagcctagaacaggggaatgaagtgtccagatgaactcatctatcagaacacagagaatcaaaagcagcacccatgggggagacacagcaacaagcacacctttcccaggtcctggctcagtgcaaaatggcctctgctctctgagccactattcacttccaagcttatatccctccatcctgggtaatgctctcttcccacctcttctctacttagcaagggaaatagagagtgcagctaacagtctaactgggctaggagcagaggactgaagccaggcagcaaacccgggtgtagcccatggggcacatacctcttcttcgtgactttcaaactggtacatccaaaagttctccatcctcccaagtgctgtctgggcaacagggcgagctctagagcatccacttgtgagccgagaagaaatcctgatctcagtgccacttggtggatagtctatgtggtgttaggtgcccttgtcaataatgcaactggtaataggagatgtgacgacctccagagtgtctgaccctccacattaacccttcagtgctgggtggccagggctgcctccagtcattggtgcagcgtcatcagctgatatttctgagaagaatctggcccacccttgttgtcagtggcacctactatttctgggggaagtaaactcagcccagaggtgctaccagagactttcacacaccccaaactcagctgtgcttatagaagctgtgaagaaggtgcagctctggtagaagagggggtgggggggtggctgaaaatgttctcaaaggccttgactgggatgcacctgggtgtgtggggagagattagggaactccaatcagctgctggctgggccccaatagcacaggctgctggaactcatcctccccccccccactaactgcattctctgtcactgtgcttttacaacctctccatgtgctgcaagggagaggggctctgacaaaccagaaagagcctcattcgtggtcagcatggtttggaccaaaaccagatgatcccaaactggtctcaaaaacaacgacacctgctgggccagagccaacaggaataaggaccccgccacagctgggtagaactgagctggagagaatagagggaagctgaggtagtggggtgcttgcagaagatgggaggcctcccgatttcttattctcttactgattgatggagccagggcggtggggagggatctgggtgcacaaagtcccttaccctcacaggagccctctgtcagactgtctagttaactgtgggccaggctagatggtagaacaaaacacacaggatctgaagcaacccatagctagaaaacttgccattcgaactggtagtttcctgcatgtggtcaagctctgtggttcgtgagaaacaggatcacagagaacacatctttagacttgcccatctttctcatcaccatacttgtgagtctgatgagtcctgctggcaatcagagtgtacccaccacagtcacagtcagtggcctgcaattcaggaaagccttttgcaggactgtgggcagcgtgttcctaaatgactgtgctagacacttatccacactttttcccccctgatatttcctttaaatggagaaatcattaggtattaattatgaagtgtccagactagtactctctgacagttaactctctctctggcttttggtaaagccactttcccttgaccactcttgaagctactttggttttgtagccttcagaacaaagctaggggagtcactgctgccatgaaaagcttgtcaccttctcaggtattagccagagatgagcagctcaaacatgaatccagttatcagacaacagaagactcaaaatcaaaacccaagccttctgtgatgtaggaaccatctacacacagcatccttttggcatgaggaaacttgaatctcttgccctggctgttgtgttttcattcttcctttcctttaatgcctttaatgttcattctgcacctgaaacccacttaattattcatcacccccttctccaggctgcatcaattatggatcacatctgtgatggaaaacttcgctagtagcaagatggcgctgagatgggagcaaaaggaataggaaccgcacaccacactggagggtgagagcatggagctggggacaacagccgccctcaaggccagcttgccttgtaggcaacccaccctgcaggcttcttccaatcccaggattcccctgaattccacgctccccaattatccctgcatcgtggcccagagagatacaatattcatgcattacactgggtcaactagaggcccaagtggggctgagcagggttgaaggctacagtgtagtggagcaggtatttctgttcccacggtcaaaggagaccaccagcacagagactgaatgcttagccataactcatgagtctttacagcagattctttggacactggcagccccttgaggttgaaaataaattcagcctaagagcatgccatggatattcttgtccttccccctgtattcttgagtgaaaccactcactctgcctctgcgctggctcacacacactttggcttcattctgcaccagtcaccttgggccctgtaggttttctttctctgcctctcacagaggcagaagacacccttaagttttgaggcccctgctctttgctgacagaaatgactggtaatgacataatggcggataccaaatatgggagagacacttttcagtggatccaagggttccacctcctgaaagtcaaacccctgtttaatcctctccctgggaaggtcatgtgggttagctattagcctaaacaatgaaacaaaatgacagtggtgcagtgtcactcactgattgggttaccaagggctgtggcttccatcttgccatcagactcaggagctttcttgtcttgcatactttaaaggtgaaataggacacacctattgtggggcaaagaactgagaatggccaagatcaatgggaaaccgaggctgtctgccagttggctttggagacttgaatcctacccacagcatgagagcttgggaacagagcttttcccaggaaagctttatgatggtaatagccccacccccatgccagcttgcagtctcagagaggctctgcagtatgatacagatatgcacgttgctaaatgttgggatgatgtgttatgtggcagtagtctaagacatcaaataaagattcagatgagagcctgaagagtcgaacaggtggaggggtctggctgtggacttgataaaggactggcctccaggggaacactgtgcagacagagctctggctgtcatacagtgtcactggggtctagtacaacacctctgtgcagaatatactacagaatatcagttcaattttaagatggactttcaagttgtgaatagggaccacagtcctaattctcttctagctcagtagaaaagtgatgaacaggtcagggatggaaacaagacttaggactcactgctaggttgtatcctgaggtcaaagaggaggataagacctagtgctcactgctggtcagtccccaccccaattagccatgtgaggtgagcacaccaatactctcaccccactggagagactgcttggtgattaagatcactggatctcttccaaatgatccaggttcaattctgtagtgaacacatacagcagaaaacaagaaaacaaaatggagtggttcacaagataaaggcactcctgctcaatgtcctgacatcagagcatgctgagagcagaagcaagcacctgggcataaccgccaatgccttggagtcaggcagcccttgccaatcatgagcaaggaccaaaagtctgcaaggcctatataaggttcagaagaaccaggcagctcagcagctgctagtcaatgtatttcaatgcacatgaaccgtgtatactcccaacaagggatacttctggcgaccatgtcttcaccaagatctcctgattctgactttggtgaccactgagaatccagcaccctgtttgacctggctaatcaggcgaccatctagcttctattgttctcaatttctcaaggagaatcagctgcagagccagcgcccagtcactgtcctgccctatcagcagacgaggacatggtggcttgctgtgcactaggctactgaacttgcaatctgcttgtgctacccctcccccactatccatgagtgaatcctgcctcaggacatcagtggcatcacttagagctagactgttaggttgttagatttgttcactgtgagttgttctccatgcttatgtaagaacattaaccatgcatttggaaaatacacctttctgtctctctatctggtaagtcatgttctagacagattcacagcacccacatggtagccagagacatctataactctagttccaggggatcagacactctcttctggcctgagtgaggatgaggcacatagatggtgcgcagagagacatgctggcaaaacactcatacacattaaatgagatgaaataaattttaaaaaaggactcctgacctgtcttagggtttctactgctgtgaaaagacaccattaccacagcaacttttaaaaggaaaacatttttaattggggctggcttatggtttagaggttcagtccattataatcatggcaggcagcatgcaggcagacatggtgctagagaaggagctgagagttcttatatcttgattcacaggcatcaggaagtggactgagacactggaagtggcttgagcatatatgaggtctcaaagcctgtttccacagtaacacacttcctccaacaaggccacaccttctactaatgccactcactctgcagtccatttcttagaaacagccacatgacaaaagctagattcctcccagctcttcttcttctctgcagctattccttatctatatactatatactatatactatatactatatactatatactatatactatatactatatactaacatatagtaagtcacctagtcccctactgttttgtaccttctctttcttatgttccctttccctcaaagttacctaggctgctttgatatgtaaggtctctgtgactcaacccacccccataagcaatgagactgttctacatggtctaaatgcatatttatacctctcttttcagtataccttaaaccaaaactcttaccctacctccactataccaggttagtcccctcttctaattcctagtcagcatcctaataccaaccactaatctcaccatgatttcttgcctttctatcttctcttcagacctgcaaccactaatagattagttgatacagtactactggtgtctcttactcttaatctccaaacaatgtatacttaaggaatagttaactggggtaagatgaaatctcaaagttgtgttgatttgaatttccctaactacatgaacattttttgagatatttcttagcctttctcctcttcttttgagaactctctgtttagatctcaggtccattttttgaacaggtcattttttttggtctttcttttttgagttctttatatattattgatatgaatcctttgtcacatgtatagctggcaaaatctaacctaaatgtctttcaactactgaatggataataaatatgtggcaggaagcaatagcgatactagttccatccatttaccatggagtactattcagaaaatgaaatcatgaaattaggaggtaaatggatggaactagaaaagtttatattgagtgaggtaactcagactcagaaagacaaacatcgcatattattcctcatttaaagctcctaactccaaattttcagaagtgagtacatatcctggaagacatacactgcataaaccaagaaagtaaaaaggagccattgctggagtgtaggcagggaccaatagagagggggatatcagggtataagtgatccaacaggggaatgggaaaaacagagtcgggggtgctctagttagcaaaagggatggagctaaaatacagaagggggataaaataaataataaggatgtatgaaaatggcttaaggaataatacaattagctatctacatgaaatacttataatacacataagttggtgtataactatacatacaaagtttaaaggaaaatttcccatctgacaatgtttcctccaagagccaaagactagcaaaaaccctaccaccaggcatgagaagccctcttttgagctgttggttaaatttctccaagatacccccaaatattatagcatattgctattgcccttggtagtccctcagaggtagacggtgagtccctattgctgaagacaccatccacttcagacaaagggcctggaggcccttgagctggaactgatctgaaagcctcctccctaaggacaagctttcatggtaccagaaggtgccacacaagtttccaaaggggagaagcaaccaacagtcccacccagctttgatgcttatgaacaaccaccagcagcaaggcacaatagcccttaggcacatgcctggttctcagtggctttattccataactcctttcttctatccatatgtgtcaggggtgtccccaaatagaggcctagtagagaggctattgtttgaagctgtaaagttgaagcttggattgccttggagaacccaagatgttagatgttgccagggtcatgggatacctgccaaggaaagctgctaacagggagtggaaacagcccaagagaaagaagtgtgttgcagtcaacaaagctgaacacagttggagagctaaagagtgttttgacatcagacatagagttgcagagtctggagtttgcccagctggtttttgaccttgtttctgtccagtatttcctcactatgctccctgccctgtgttttggaatggtaatgtatatcctgtgccattacatgttggaagtatgtgatctgctttttgattttgatttttacagggggattacagttaagagattgccatatgtctcagaagagagttggactttgaaacaagtttgagactgttagagactatgggaacttttgaagttgtactgaatccatttttgcattatgatattgttataagcctttgggggccagggaatagaatatagtggtttgaaagaaaatgccccccaagggagtggcactattaggaggagtggccttcctggtggaagtgtgtcactgtggggatgtgctttgagatttcttttgctcaagcttccctcagtgtgacagtcggtcaatttcctattgtctgcaagatgtaggactctcagctattcctccagcaccatatctgcctgcacgctgccatgctccccatcatgactgaatggactgaacctctgaaactgtaagtgagccgccccaattaaatgttttcattataagagctggcatgctcatggtgtctcattgcagccataaaaaccttaactaagacataaacctacagccaacattatgttaaatggagaaaatttgaagcttttccattaagatcaggaataacacaaggatgtccactctctccactcctacttaatatagtacttgaaatattaactagagcaataagacaaggaagtaaaactggtacaatcagtgaaggaagaaacataacacccctgtttgcaaatggtatgagtctatacataagatgttaaggattccaccagaaaatggaattataggaaaaaggacagaaagggaaaatatgctgataaaggtaacccaggcccagaggtacaagtggcacatgtgagacatcacacacagattctagctatgaactttcagtgtagccggcttaaagtggaattcctgtaagggcggagaagctagaaaggatctactagaggaaaaaaaaaaagctagaggaggaaagggtgtgtgtgtgtgtgtgtgtgtgtgtgtgtgtgtgtgtgtgtgtgttgaagtcccacaagctaaagtcatctgggaagagggccctacaactgagaaaatgtctccatcagattgacctgtaagcaagcctgtggggcattttcttgattaatgactgatgtgggagggcccagcccaacatggacagtgtcacctatgggcaaatataaaaaagcaagctgagagggtcatggagaataagccactaagcagagttcttccatggactctgctttggtttctgcccttgagctcccattctggttttctgtgatgatggactgtaaggtgtcagatgaaatacaccccctctcctgcaagtttcttttggttgtgatgtttaccacagcaattgacaccaaactagggcaggaggacagaagaacacacatgatatgaaagtagggggtagatataggggtggtggtggaaaggattaaatgggaatgagtgtcttaggataggatacaggagatgggaggggaggggttaactaaaataaacgatgttatgaagaatttctatggaaacttaccattttgtaaatatagtaaagacaaaaacaccctgcatgggtgaataatgctctttctggaggcctaaccttattaaacaaaaatcctagtactaagtgaggggtatcaccctatgtgatattggtcagggaggccctatagcagcagttctcaacttgtgggtcatgacccctttgaggagtgcatggctgcatatcagacattcagcatatcagtatttacaattcataagtgtagtaaaattacaattatgaagtagcaacaaaataattttatggctgggggtcaccacaacatgagaaactatattaaagggtcacagcattaggaaggttaagaatcactgatctacaggcttccaaaacattatagcctattgtaaatgtgtttgcttgcaaaccagacctagagcctaagatcctactgtcgagaggactcgtcacatttgggttgtaggacattgagaaatcaaactgagtctgagcttgaaggtttctcactgctgggtagctttcatcaagcaaaatcatctacctgtggaccttataagctacaataacaacccctggcaagattaccccaaagtataatagtggcatgactattatgggggtaaccaataaccttctgattggatctgaggcctgacccacaggaaggaatcataactggcactataaacctggtcaagaaccatggctggaagatcataggctctggaggagaatctactactattgtaaatggacacagtatcaaactgctttctaaatatacaggtttatatctgtagatcaatgcagctctcaactgtttgtcagagaagcttctttttgtaataggttgcagttggtcttacttttctacaactgtgataagacaccatgtccaagataactcataaaatagttgatttggggcttatggtttcagagggatagagtccatgaccatcatatcggggagcacagcaacagacagggaggcaggtactggagtactagctaagagcctacatcttgatccacaaccacaatgttgagagaaataaagcctgggtacagtgtgaggcttttgaaacctcaaagcctcaaagaaaccatttcttctataagttgtcttggtcatggtgttttattacagcaacagaaaaagtaactaaggcagaagatggtaccaggaagtgggttattgctgtgtcaggcctgactatgctgtttttaaatttttgtttttagaagaatgtggaagacctttttaggacattggactaggaaagcagttgaatgctgaaagtggggcttaacagggcatcctaggaggagcttggaatacaataatgctgagagaaataaggactatggaggcccagctcaagaggtatcagagaggaacaatatcagcaactgagtgagacaccattcttaggatattttggcaaagaatgtggctgctttctccccttagaatcgacccaaggctaaatgaaaagtactaggttaatttccttggtggaggagatttcaagacaacctaatattgactctatcttgtggttgctagtaatcaatcttctgcaggtctacaatgaaaaagggcaagaaggaccaaaagaagtaaaaaatgtacagttttggagtgaaaaagaacaccaggaaatttaatgttggagctaaggcttgtgcagaaagagatgagattaaagtaaggcctgttcaaaaaatggaataaagggtccgtgccctcagggaaagaccccatccagctaagcttccaacttgtaaaaaaggaaaagcctgaggaattttctactcctaaaaggcaacaacaaaggaaagcagctacaaatattattcaagggggccaggctcccctctacctggggatatggttccccaaacttgtcagtattatccttgtgtttctggctttagagtcaagaaggatacagaagtaagtacaggggttgtggaatcttcctctgaggttaaggagagctgctgaggccagccatgtggcagtggagtcccttcatgaaagccctaagaggccattacctgaatctgtgaaagtgaagcctggattgcattggtgactccttggtgttggagatgccagagccatgagatatctgcccagaagagctacaggcaagaggaacagcccaaggggagaagtgtgttgcaggtagcaaagcctgaaggacagagtcatttgagccctgtgacattagacatggaggtacaggacagttaatataaagactcaaacagtcaaagggtagagaataagtgactatggagtgcctgaacccaaatgagacctctataacaccccttttgaggctcgggaacactgtaggagactgggcagaaagaacataagagccagaggtgagggagaagtgctgtgaaacactgctttctgggcatgatggagccatggaagtcatgaactcaccaaagcgatggttacctgcacaagatatgactacaactgggggaaggactaatgaggtccatgctctctgagggattatgcgcagtcaatggatgctgggggaagaagtgtcatttttcttcagtgatgtaaccattgataaagtgcctatgttctggtaatgcaagcagccatagttaaactcagtaggtccaaaaaaaaaaaaaaaaaaaagacagcaaagtaaaagaaagcatttggggaaaaaaagagttttagtgggaaagaaagatgaaagatgagagagtgtaatgggagggtgaaaatgattcaaatttggtgcatatatgtgtgtgaaattatcaacaaattaaaaaaataatcaaaatacaaggattgtaaaaaggaaaagaaatgagcatcactgcctttggctgggtccatttctcattcaggcaatctcctgtatgtccaaatattcaattaaatacagagtgaccgtctaagcagcaggtttccttccttttccaaggtctgcttgatggaataaactggagcccatctctgccatctttgtgtctgatcctttgcttccatggttacactctgtctaagctttgtgggttttagaattatagggtctgtctgtcatttttatctaaccagtttgaaccctggaagataacgaagagcgatctgggataaatgtactctttcacatcaagtcagtgtaccaacctgagccaaggatgcttacttgggttttagtcttcttcagatttaaacataaggagaaatggagctgtcacaaagccattctcctgccccaagaacactacattgtatcccagcaaggagctgacccacttggggaaatcaggtgttgacagaacacaccttcatcctaaattctgtctgctagctgtggatcccattccaactccatcccttgctatctgttcttgaaatattgtggttggccagaacacatgagcaggtggagagccacagagggaagtgatgcagaccgtgggattccagctaccagatctgatgcagggtaataaagagaaaccctcagagtagtgggatttagaaaaaaatcttatctgggggtagctggactttctatctgaggggaaaagcaaacacacacacacttcctgctggtaacctaagaaaaaaggaataagcacatgctttcctgatggtgaccttttcttttacttcaactaaaataatccctctttctcggtactctgtttacatataaacatttttctcctgtccagttacacatttctatattcagttagtcacaaatctcctcacagccatagttatacatctcatttacatatcgtctcgtcatatagcacactttagacagtttctaggcacagctcctccacagagcaatagctctttcacacagctccctcccccccctcacacacacacctttttttcccatcattcactctttactctctcaccctcatcactcattctctcacacttccctcatgttgcttcttcatctctcacatttctctctcccacagcagccttctgcatctctctgcctttgctgccctttcatccctgctccttcactctctgcctcaccactcctctgtcttgactctcctcttctctcactctctgcctctctcaccaccagactctggacaattccatgtcatttttcagggcccgacccatactcataacacgttaagtcatgtaatttctcaatgtcacaatggcccggcagtgaacaagtggccttgcacgtagctctaagttggtgagggttcccagacaataagtaaacagttggctgaaccttgaggttggggagtacatgcagactaaagttgcttcaaactctgaccttgaatgagtaaaacaatacctgtgaaaaccaccttgtgtatttgtctctaggagcaactagatattgtctccaggggcaaccagtctgctttcaatttactctaaagtctaaagttagctgtctgtgtaaaaggctgtctttgcgactgagaatcccatcggtctgagtagtgtaaaatatcctagtattatttctattcattaaaattatacagcctaagcatcatctctgaccatgcacagctatatgtgtgcccaacaagtataaaacagaaccaccaaaggtctgtggaaagaactctgcagctgttcttattagggaggcacagcagtggtacctgagaaaattacaggaacaaccagtcatccagtcaataaccccatggctttgctaagtggggtccccaataatgtctggtgagtgggctttgccaagtaggactccccaacaacatctagtgggtcgacttgttaaatactagttgtcactgctgtaccctctgcaaggatgcccttagttctgagcacctcaaaggaatcccacacagaaacaaaatcctgagcagcaacacaattctttttacttgtccttgcaggcttgacaacacaatagcaaggtcaacagggtaaggtggtgttaatgagtcttaattaactaacatatgcatttgaccttggttgacagtctcctagcaacagttaagagaaaaaaagcaaaatccttgaaggctgaatgctgaattctgggcagggaggtagagtcgccatcaagaaatctaagacccagatgaagcccgggtattccccactgcttccttgcatcagctttctgaaatgagaagtaacgtggccacaggaacattggtgatcagggcaggcactaacatgggcctttacttcctagaacagctggatccacttcagcgagaaggtggctggtttctgattccaactaagcagtgttaatgccgaaaatctcctgccttgaaatattttgcgcattggtcttttgaaacgggatgacaatataaaataattgttacctgaagggggtgtttcattttcactgaccagcaggttagtttgatttaattagaacagtcctggataaaaagggctggtgggttgttgcttaaagcaaaagctgggaaccaggatcattgaagggaggagtcaggacaagtggtgtggagaggatctgtatgctagaagaccgcagatagaaaccctggtgcagagaagctgaggggaagcactgagccaagcacactaattcagcttgccagtgacccaccctaaacagtagccataacttccggaaggagccaatacactatactcatgattcttacagctcattcccagagaggactccacaccagcaaacatcttatggttactgggaaactcctcttgcactaagagcatgattccagctatgcttataataagaaaaaaattcattttaaagaagatcccacctagggacagtcaactcatgcttcacgattttgcaggactgcatggccctgggatttaactagggtacacatatagttgctcttctccctgtatctgccctttctctccagtccaagcacacatagtactgaaggtgaaatgttggagatggtgacacaaacattctaaagagtcctgggtagtttgctgagcccccacttcctaagtgagcctgtcacattcctgaactgtggacctgtactctaggaacaacattttctcagcccaaactggccatttgtttccctgttttccctgttgctttcccccaaggtttcacatatatgttgtttggtgagacaattcagagagaaagattcctcttggaagtggagtcaggtgaagagatgttgaagcctatgatttatgtttttttttgttttttttttaacaatcttccccataacatttttttaattccatggaccatggagtagctaggatacttgacttatggtgggccatcattagattctcctctagtgattctggatggcagtggtttgatgtcagtaagcagacggctttcaggcacctgggctttcttggcactggacagacaggtgaaattctagagatgaggtaagataattgaagggaacactgtgagtctaagagaagtgaacaaagcaaacattctccatcctcttatgttcttttcatgactgaaatgaatcatttgctctccaaatgggagtttaaggtcaagtcctttcattttgaagatataacagttaagactattacatctttaaagaaaattaccctggtcacatcgagtccttatggttcacagaaaaatgactcctcttcgtggttgctattgacaactgagttttgctacatagagcaccactccctgctgggagatgacacttcactgtgcatctgaaggtgcagcatgggcttgtaaatgctgcaactgtggtgctttcaccctggtaaaaggcagctctcaaaaaaacttaatccttaaaggaaggctctgagcttatataattattcacatctctggagaaatcaatgcactgcacttggccccagcatgcaccactcccactgcaggtagtgttcttactgctttctctcccgcccaatgttccaaggcttccaaactttaaatgcactatgagtccatggcttttaaacactccagcttcttcactatccagtagtgttctatgggaaacacatccttgctattcaccttattcttatgtgtgtaatgccagccaaatagaagtgtgcatacgcaatgcaaacactgcatacaacagtgcagccatcttaccacaggtcaatagcgagcaaagaagtccttcccttcctataaattgaacacaaaacacacaggagcatttgcccttctctatttttgttcaggaaaacagggcaatgagataatctctttgttcagtgaaccgtctctgtataaatccacaaatatagttttcgaagtcaaatcatactgtacagcttagggcaaaatgcaaattctttttatgctgctcctcacttcatggctccagtttcaattcttttgcaactttcttctacatttactttcatgtgcagaggtataatatatttgtatggcctcactttcattttcagatttagacattatatcctggcttcgactgtaagggaataaagcttgtgttctttctactgtgtatttctggttaatcgatgttcagtgtttgcattctgtagactatgcctatgatcttcccagctcagctgcatgcatacagtactgcatttctggctggtgtacctgttttcagaaaggccaatgaccaaaggaaattggaattgttagaattgatttttgaatagtgttctttgtgctggtcaacagtgtatgttaaaccatctccaaactgcctctactcccctgaactggatcatcaggatccttctgaccaaaaggatctctctgttcctcaggatctctctgctggcttctctctctgctgttttctttctcggggcctcctattggagtcctagatgctttggattggctgctgccttggctttctgcacagtagccatctcagtgccttttcttcatctacctgaaggggttccctttctctatttcctgtggtggagtccctcccacctcttttatttgtgtttttgtttagggagacaatgacatgcctcccttactatagaggccacacatctgcaggaaagaaccatttggctacacacactagagatacccagaggtccaatgtctcctgtgactgcctgttgaccaacctttctttctcaaccatgtcttcatatccctgttatctgaagcatgggctgtttcaagttcctgagcctttctgaggtgtctatcttcaaatcctcagaaatcttgatagaaaggaagaagcaggaacctcccctgtgaattactcagtactgattaggccatgcaatgggaacaaaccactcctacccccattccccagtttctgtggcctcaactcaggttgcctgcaggtctcactggggtcaccagggaatccttgctgtgctcagggtcacaccactcttaccatctggcttctggtttgttgcacttaaagcaagtagggtgttttctgctgctcctgcccggaagtaatacacctacaaatgcatatgtcactggccttgccgcctaggacttcagggatgaggacatgcaagcctctctaacttgaaagggaactggaaatatggcccagcatgaaaatgtccaaaattcaacagcagattattatccgcatctactgtttctgttttttttttattgccttactatcattttaatgaagttataggaaagtagaaatgagcagctatcagtctacactgccattcagggtagctcaaatcttctgtcatgcactgtgctggctgatgtcaaaacaattgtccctaatgactgtgctgcctgcagagaagtctgtgactgggaacttttcagaacacatcattcactatcagtatttttcaaggagggagttggaaggaagttctcaaacatacctagaagttagaaagtccttactggaccaaaagcacatgtcctttttcagatcttcagaaaacattcacctggtgctgagcagctatcatttcagtaaggagaatgggttctctaggataatcaatcctcaattcttattctgtctactgtaccagcaaacacatgcctgcttgctctacataaatatacaattttggggttacagggaactgaacaggtctgtcaaaagcactgttagcaattacctctgtcaattggtaatatggctgttcttaccctccacctgttccttggcactttctgattttgccattttttttttttaaacacagcatggcttttggaataagaatttcagggccctctgtctctgcataaccacagtggtacagtctttcactggagaaagtctcaagcccacagttcctaactgggtcccctctttgaatcggtggttctcaatcttttatacagttgagatatcagggagaattatgaaacaaaagcaaaacaccagatcagcaggctctgcctcaggcactgggctttggcaagaagggtagtgatctgcatttttaacaagacctttgcagactgcagactgcagtagttttaacggtgcctttccattttctctgacagcatgcatggaatgagatttcagtaaatactttttgaagctgaggtgaggtggaataataccatcaaagggggagcaaatgaaggtctttcctataaatatagcacggcagatgaaatatgacccacagatccaaacagcttagggaagatgggggcatattttatggcataggcttctggctttgcttattgttaacccttcatacctcagtaagccctactcaccgattccttagcatcaagataaattctgatggctcgggggctcctaaatatcattcaacattttataacaagatagtttttttttttccagtaaaacattacacaagaggcttaaagtgccctcctagttcaaatgaacaaaagctgtcctggccctactactgtcttgggggttcagagtgaagctccagggtcaagtggttagcaggtcatttcaaggggctgatgcagctaagaatgctgatgaaggaggccagcacccggatcagataaaatgaaactgaatttaacctcttgacccttagccgatgttaagctccattttaaaatgaaattgcttagaaattactggaaagtacagaaaagggagagttagagcaaaaaaagcatctttatagtgaggcagatgggcaaaggttagtcttcttgagttattttcaacggactgtgacacctgagcttgacacggtctccaatttcaaaaatggcaaatcagctgttaacagaggcagcagcgacagccctgcctgtagctcttcccagtgaagcacatctggttttaaatagaaagcctaccttctgtgaagtgacaaaagcttactggatgctgcaggcagtcacagtgtatgtgggtgtgggtgtgttagggaggtgggagtgctgtgggatggggggtttccattaaagaggccacagtggccatctgtatctttaagatatggcttcgtgacaatggttctctaactgtggcccagggtcaacagcacaaactcggaccttattagttgggataacactgaacaactttgccatcttaaataaaaatgttgaggattttgatggaagcattaatctaaagcatcagtctaggcaaagaaccccttcacttgtcttgactctctgatgcctgatgtatcaagacagggcttgatacagcctatatgcattgccatccttttagttgaactgctgattgatgggtggggggtgggggtggggaatccccaggtgcccgtacacacctgagaacagactggtctctggttagaactatcctcatcccacctgtgctaggccactggttcaccccatttccacacaccttgttcttttactccttcctctcaggaacccttgcagatcttgtacttccaggacggcggcttctgcaaacatcctctccaagcaagtctcgtcttactcaatgcagacttgatacaaattctgggactgcactgaggaagttcagactttctcaatgagcaccaagagggacacgtgggggtgggcactgacccaagaatgtaactctcaacaagtcctccacataccatttggtaggcatagggatgccttttgggtctgataagtggggtccactcttaacacccttctgctggcgccacagtgggttcaactaccgtggggaggtgcatagtgcccttacagaccatttacctacaaagtcatttctcagacttgtaaggccacagaagttagtctcccctccccagggcctagagtccaggcagcctgaacccgtacatacttacatctccgtccatgggcctctggtcgtcacaatccctcgtggggctaatgtcctggcgcatgacccagatgggctctttgggttcgtcgggggtgtaaggcgaacggatggtccgggttttcacttcttcgatggcctccttgatgtccttgatggccagcgagatggcgtctctcttctccttactgtaccgctgcccagcctcaccgccacccgttgctggtcccatgacccgttgctggccggcaggtgccggcagcccggggctgtcggggtgtcctcctcctggggtcggggcacgctccaggtcctgctcggcctcgggcatgtcttccgccgccttgtcgaggctctgcgaactcatgctctgcttgacttcggccacgatctggtcgatgtcctcttcctgctcgtaactgtccatgcgcgggtagggcgcgaactcggcctctttctcggggctgtcggactcgccgtccgagcgctcgtcgtagtggtgcaggcgcgcgcccagggcctcttggcggtaggcggccgcctcatcgcgctcctgctcgtagagccgcaggccgtcgcgcgcctccagctcgggcgcgtccccgatctcctcgtacacgtgctcctggaggccgccgtagtcggcgtagggctcggcgtaggcttcgtcctcgccgcggtggaagagccggtgcgtgtagacgtagcccgagtaggccgcgttcatggcctcctcgtgctccagcgagtggaagtgcaggtggttgggcagcgcgcgccggtgcgccgcctcggcgtgctcggcctccgcctgctccgtgtactcctcggcctcgggccggtactgtaccgcgtaggcgctctcatcctcggggtcgtgcgcgcgctccgcctcgtaggcgccgccgccgccgtcgcgggccgcggcgagcacgtcgccctcggccgtgtccgtgtggttgtggaagccgctctcggtgctggccgagcgggccaggctctccccgcgctcctcctcctcctgctgctgccgagccagctgcgcacgggggtcatcgagcgcaccgtggcggcctgcggcctgcgggggcgcctgctgctcctcctccacgtcggggtgctccaggtcggcctccacggactcgttcacctcccctcctggcgcctcgtcgggcacctccacctccgcagagccctccaagtggttcatggtgggcgtcgggggatggctggggagaggctgagctggctcactgcgctctcattttgctccacgggggctgaaagaaacagagagagagagactgctgtgtggtttaaaatgtatgagctctgagcatcaggacgggcatagaaacacccgctattgatcccttctgaatctgggtcaattaagacacgattgcaaatttaagcttcatctgacagtactctcttcttcacgcacgtattgtaatttgtaattacatatttatttacttgtttaattgcctattgcgttctccctcccaagcccagagactgagagcttcgaaggcattttgttcttcatgctattcagtttgaatttcctgaggtctacggatagagtattactcaattggatgggacagttggcacatttccccatctgctcaaggataaatctctctaaactaggatcctggatactttggaagcaactctttaaataaatttcggggcagggggcacaatatcatcttgcaatttttgacgccattgctatgggtataaagatgtagcctttctggggaggctggtaatcaccaataggtccctagttcttttacctctacaaagacaccaggttctttttttgggtgcagaatggacataggagtaataaatggaatctctagttaaataaccttgggaccagctgattgacaggtaacttttcactgtgaagatccaagaggaggaagttataaaacgcaaggtttctctaactcatttgtctctaacttatttgacccagaaacaccctagaaaccagagttctgacaaaatatacaaagtagacagtttctagaactttccccatgtgtcctggatttaaaattctgtaattctgtgaatgccatgatatctgaaactagagtacatggctaattttcaaaaagtgtgggtagggtaggtctccacccatttgtgaggaaacttgcagttagaataactgatttcagcttttatcaattctcatcacaaaagcagcctttaaaggtcagtggaggcagctccagtgggttatagcaattgctgtgaaagcaagaggaccggagttcaaatacccagcaagaaagaaagaaggaaagaaagaaagaaagaaagaaagaaagaaagaaagaaagaaaggacggagggagggagggagggaggaagccaaacgtgattgtgggtgcctgtaattccaacgctggggaatagagacaggtggatcctgggagcttgccagctggtagcctagccaaaatggagagttatatattcagatgaagattgtctaaaacagtatggtgaagaatgatcaaagaagatgtctaacatcctcccaaacatgtgtgtgttagaacataactccccatgtatgcacataccacacacacacacacacacaagcttttaagcataacatacacagtgtgtatagaaacagacacaaagaatataatgaacaaagaaaccaggcaggattctttgagtttccagaaacctacggtaaatgaactgtcatagttagctccagcggtcaacttcacacaatccagtcaccagggaagacagaacctcaatcaaggaattgcctagatcagattggcctgatgccatgtctgtgaggcattttcttgattgctaattgataccagagggcccatgctactatgggcgtgccatccctaagcaggtggacctggggtgtataacaaaggtagctgagaaagccaggaaacagcattcctctggggatttctgcttcatctcttgccatgtattcctgctttgacttccctcagtgatggacctgaagctgtaagatggaataaacccttttctccttaaattgattttggtcagagtggtttatcccagcaacagaagcgaactaggacacgggtttaatagcatgtttgtttttctttcattgtacaaaggggcaggaaatggtcttaagtgtaacagatatccccaagaagataggagcatctaatcacctcttaatatcatcatttattaccctccactcaattcctcaccatagccacagcaattccgttccaacattacaacagatgaaacagaaagggaggctgtgttggagctgctgaatctatcttcaagcagagtatcacatccccaccccaactgtgatggatccacccctcactgattctggatagaaaacaatgatggccaaaactactgccccctaatcaaaaagagtaccagatcagagtcagtctcttctgaaaaaaaaaaaaatggtggactcctttcatcaaacccccgaaaacagtaactggcctgaatataagaaaatttcctaaaaataagaatagtcatcactgagacttttacagatgcgaattaagcagtacagaaaaagcaagtgttgcttctgaggtacagctggttaagaggcctccagtagattgtagaaaatataaaacagatattcaatacattgcaaagtcactgtacctatttcatttacagacaatagacaccaacacagcacagggtcactgacctgtgtaccaacccagttcttatgaccatgtgacaagttcccactgagaggaatacagcaggcttccctaggtgctgccattgtgaggtatcttggctgtgtggggtcagtgttaaaaacatgattacctgaatggccaacagttcttaataccagttacagaattgacatagccactattttctgtgaaaataggcttttctattcacagaggtataacaaagaaattctagtctgcactgagttaaattgtatttgactagcagatacattgattctacaaaaatgggatttttgtacatctgcacataccaaatcctgatagggaaagttctttgtggcaatactattaaaggcatgtagtttgagtacaacagagcattttcttttaaacaatactagtgatgtaacattctcccacatttgagtctgtgggaccccattggcctttattggacacttgccagacactgtatatagcaaaggggattcaaccatttctggttgaatctggttcaaagatagatagctttaataattataatacccggctatgaatgcaaaatagaaataggctcaagacacggaaggcgagcatagtgaaagaaatggaggctgctatgtcaccttctggtcccattaagtgctgttgtacttaagagttctgcatttcatgagttcaccagcatgcaagagctcagatctaggagaaagacactaccatccaactggggctttggtagtggtccagtcacctcgagaggcagagcaaaaggaggaagagctggttcaaggaaactcctccctctagctataaaagggctgtggagcatggagacacagacaggaaagcctcatccttgggggcacctacagcatgaaggtgcagcaggactgagagagcctgcaggctgccggtgggaaagcacagaccacttccgcttcccagttcagggatgttccacagcctggagaaagtaaacaaaaagaaggcattctgctgctgtagaatgtttagaatacagaatttcaggatccagaggccaaatccaggtatttggtattgttggccaagatacatattaatttgagattgatagaagggagggctgtatgtttgctttcattctctctccttaacttgttgcaaaacaccggcaattaactgtccttttttgagatattcaaaagtagctttagaagaaaggtatggctgaagacaaaagccaggttgtaactctctctctctctctctctctctctctctctctctctctctctccctctctctttctctctggtgtgtgtgtgtgtgtgtgtattatcaagggtgatgatagtcatgagatgcatggaaaaacttaaaggtggaataggatgttgagatgaaaagagaaattttgattctattacataagagattttatatatgtgtgtatttaagctgctatgcctatgccctggtgcctctgggaaaggggcaaactaaacttttatccctttaagcttaatctaccttcttgtgcatgcccaacacaagtggctgggtctattcagtgagtcttgatagactccatacttatacaactacctccaaacatttaatgcaggctgcttatctttccccactggagttggcaggcaagccccatttcttgagactgaagtatgtttcaagtattaacacccacacgtattacactatttaaataatgtttgtcagtcacagtgagggcaacatataaccctgagatagattaatgtccatagcaataaaaaaatgtggttgctagacaggattatgccttggatgcaacatgtggatatatgtgtatcctgtatatgttgagattaatgtgtgtgtgtgtgtgtgctcacactcatgtgtccatctgtgcacaagtgtgcatgaatatatgagtgtgcaagcatttagaagctagaggaaaaccttgggctttccttgggtgcagtcttttgtttttgtttttttatttcttaaagacagggtctcttactgacctggaacttacttagccaagtaggctgggctagcttactagtgagcctcagccatctgtctgtctctacttgtaatcacaacactacaggtggctctttttaaaataaaggttctggagatcaaactgatgtccttgccagtatttcacctgagctatctccccagctcctaatgtgtctcatattgcacaaaggatgagggagtaagagcacacatgtagtccctaccttacaaaccttcctcacttcctgagttagatcagctgtgaaacataccacaaggagttcaaaggatctcaagaaccttggatggtcagctcctttaaatataatgcatctgtttacaatataacataaaagacaagaatgaagaagtctagggttcattaaagcaactttgatgcatgtggaagttaaatttggtaataatggaagcctaaagatggacatgtaaatgcatttctccttcctaaaatcacctagatagctcacatggtcagaaaaacacttctaacacacaactgtcttgctccagctaaacactttgttccacctcatatctttgcacctggtatcatgaagtgtgaccgggcagatggcacatgcgatgatttctgaatcggatgaccacctgaacaaaggtttgttgctgagagctaggcgtcagctaatgtgaggttgctgatgaagctatggctgtatatcttcactttcccctccagaaccactaggctgctcctgcctgtgctttttaaggccagcctcttcgaacactccagtaaggtatccagtcctctgtttctcttcagccaacaaagagtgtgacaacgacattaaagagtccgaggttggggtattcattctctcaggtcatctctgacagtagtgtggccacccttaagggcacagctgttaagacacgagggctcccatacttcccttatagtcttatggaccacaatggtactgaggtcttgtacagctgcacctttataagtattcccgatactaagttcttatgtctttgtacattacctgatttgaatacctattgactttctactggtatctaactattatctaaggtaggatgcttatgtataagtattaacagatggcaaaattagtcacagtagctagcccacttaataacaaggttaatattctaaatagtacagctgtagtcaaaactatgaaggtgacactccaatgagaagctccgcaccagggtccactctctctctccctagttccatgacatggctcccaggggttatgcacattcaaggaactgacaacaggaagttcacataggaagtctgatgagcataagtaccttgccaagggtctaaactgctatctcattcctcgtaccagagcagaggccacctgcccgtcattcactggaatatttcagtttcttttgcctgggtctcagccttcacatttctcctctcacctcagcagaaaccatttgactctccttgactgacctgtttcattagccccccttttattcagaatgccaataatttgggtaggaatgtgctgtgactgtcatgtttcttagatgtagactgccagctagactgaacttccatccacagttggagctgatcctgtcttccaatacctacccagtgtgggtatgtgaggcctgatcctttgcaaccaggcttggtggactctatacttatatgtctcaagggcattgcctttgttgaaagaccttggacgctctttttttttttttggtttttcgagacagggtttctctgtgtagctttggagcctatcctggcattcgctctggagaccaggctggcctcgaactcacagagatccacctgcctctgcctcccgagtgctgggattaaaggtgtgagccactaacgcccggctccttggacgctctttatttgggagcggctctgaaagttaatttacaggatctgaagttactagaatattatctcactgtaatatcataatatttaaatgaaaaccacatttggttttttttttttgataccccaaaggaggtatcatcaccttattgacaagtattgaaaaaatcagtggtgcttgacattatttaactaccaagcccttagattatccgatcatttactctaggtaatatggtactgtggtgatcaaaatgacaggcttaggagacagaaggtcagctctggtccctgggtttattgctcacccactttgactttgaatagcttacagcaaatgcctcgttttatagtttctaaaactatcataataagggtacctacaggatagggtcatttagaacattaacagattcagtgtcgccacactaaacaatgtagccacatgctccatctgtacatactgctccatatactccatttcccactctcacaaccgtctctgtgggaattattagctccagctgctcattgggaagcagaggtccagtcggcttacataaatagtccaaggtcactgggagcagaaagggttggaaacggagctgctggcactctgctgcgctcttcttcctgttacattatgccgagcccagaaagtaatgcgattgattttttttaaacaaacatttaaattggcataatagagtttagaatggtgaccttggcaggctctccccttacctgttctgagggcactgcctttgttcaaagctctctgggcactcttatgttggaattgatttctaagttaattgaagggttttgaaacttccagtgaataattttcaatgtgctataatcatagttatatctgattttttctttcatttcctttcttcttcttctttttttaacctaacaggcatcattcagagctatcactcgaaaaattttgctataactggtttttaaaatttaaatgttcttgtctcttgatacttccttatgtttttaaaaatgcaaatctattcctaaaagacaaagatgtacaacagccacaattactatagactggtcatctctgaagtcccttcaaaagggtggccttaagaatagctttggtcagtggccccatctgtcataatgaggctttatcctcactggagaaacagtgatgcagaagataaccaaatggatggacccctgtgccatttctgcataatcaggtctattactttcatcccaccttgaaatcagaattaatgctaaccaagcagcgtgattcatttacccactaggatgaatttagtcattccaaccacaaagttctatcatagcccagtctttgattaagaagacatttctaaatttttcagaattccttactttctatctctttgcctcacacgttaatgatcaaatcactcatttatcagtctgattccaataaaatacactcaataagctccgggcaaccacagaaagtcagaggggagattttacaatttttacagaaacctcaagggatgctgtctggaaatcaaagcctattaagcttctccaaatttctgtgaaatgcctctggtataaaaaaaaacatatctatataattcataatttacagagggctagaggagcttgatatggttttcctgttacaatttctttttgtatgacccaacttccttcccaacccctacagtagtcatgatttctgctgggttacactcagttcaaaagtattaagtcacctgttgcagccaatctagaacatttccccgatatttcttttgtactgaccccccccaagccccgcatcaccaccaccatagagtttcagatggtaagactttaaaatcggtttggctatgtgacctttcagaggctcattaagttatactgtgagaggagtaggagacggggaggttccagctaaggacaaattgaacagtaattcattaaaatacaatctttcctctgagaccacatcacctcagatttactgctattgttacttttacaaattatttggctcattagaaagccagttaactcgctcttctctaatcctccgcgttttgtgttcattttccttcccccaaacagaaaccagaacggcagctatggcctaattgcaaagacccaaattaaattcttgtctctgaactttgtttttgttcatgggtcaggaatggctcagcagagggtctactgtccattttacacaaacaatattttcactcaatcctcagatctgaggtgatttgcagcacctgcatgcaggaagtcctcactcacaatcctaaaaccaaaattcatcaagcaactactatgtagcaacagtggggatgacttgaatttgaatttgatgagccagaaatcccatattgagccagattcccaaggtagttcagctctgtttcctcacattagcaaaaaagtttgtagggaaggaaacaaagagggaaaggtggaaaaatgcttctccttccaaatgattcatgggtaatctggaaacccatcagaattcattgaccatgttaattaaagagagtaggtcttagatgccccaaatacgagtattgctgggaaaccagatatccacacatagaagaatgaagctagatctttatctatcatcctgcacaaaaatcaactccaagtggatcatagaccttagcataatacctgaaactgtcagaggataaagtagagaaaacacttcaagataataggcataggaaggaaggactttctgaacaaaactatggttgctcaggaaatagggccaacattgtgcaaatgagacctcatgaaatgaaaaacattgccactcctcctcttcctcctcctcctcctcctcctcctcctcctctgcctcctcctctttcttgcaggcctcttgttgtttctgtcatgctgcacactccaggctagctagtctgagaactgtttatgtgggtcctgggtgttgaatttcaagtcatcaggcttgtatggctcatacgtttacccactgagccatctccctgctccttacaaacctctgttcagttaactgagtgacgcatctttgatatatctatatctgtatatctatatacatatatgaccaatgtctaaaatatacaaataattaaaaaacaaaacagaaaacaaatagtccgattaagttgggctaatgaactgaacaccgagttctcaaaagaaaaaataaaactgccaataaaagcattttaaagtgttcaacatctgtagccatcagagaaatgcaaacttaaaactaccgtgagactccatctcacctcagtcagaatggctggcatcaagaaaacaaatgacaaggaggctgatgagggtatggggaagaagataccatattcatactggtgggagtgtaaattggtgcaaccactttggaaatccaggtggaagtttctcaaaaagcttaaaacataactatcatgtgatccagatatgccatgccttggcatatacccaaagggctctatatcctaccatagatatacttgctcatccttgtttactgctgctctggtcacagtatcaaagaaaggcagttagcctggatccccttcaacagaagaacagattaagaaaatttaagggaagtttattcatctgtaagaaagaggaaattatggcatttgcaagaaaggcggcgatgaaactagaaaatgctacattgagttaatctaggctcagaaagacaatgatcctcatagtgtcttgaatacgctgatccagcttctaattttcatatatgtgtgtctgtgtgggagaggctatgtaaagaggaggaaatcagaaagaggctgctgtggatggaaaaagaagcttgaagggaaaggagtggggagggtaataaaacatgtgtgatatgacaggagaagggaaataccgagggtcaaaagtagctctaagttgggaggaagacagggacatgggaaaggggttgggtggggaagggaaaccaaattttgtataaaagaaaacactacaaggaaatccactactttgtaagctaattaaaaaattttaaaagttttcaaaaatgaaatttaaaaaaaatggttagaaaggagatactcaaaatggctgggcaatgctggttctagaagccattggttactaaacaaaaattccagtgccaggtgtgtgaagcctctacacgagctattgttaagggaggctacaaagaccctataacactacaagcttttgacactcctcttgtcttcccactggaactagatgacataatcttattgaatgcaaaatataaagaaatcaggcttaaaaagagctagaaagttctgccattctggctagcttcatagtaccagaaggtgctatggagcctgctatgggagagaaggcatggatgatcttatccatgcatatctaaagtatgatagcaacatactacgcaagatgagcccatgtatgtaatagtggcatgggtatcatggtggtaaccaacttctctctgattggatttgagacttgttcttcaagattcctgacaatgaaaacccagtgtgtgtgtgtacacacacacacacacacacacacacacacacacacacacacacacactgtgggaaagtcagagatcctagtggggaaattactagtattgttcagctaaattgacatagcatagagttgccttctaaatatccaatagatatatgctactattggctttaactggaagaaatctctctttttttgggggggggggagtagtggtgaatggtgaatgcagagactcaaggttgtttacagtagctaagaataagtgactgttgactgcttagccctaaataagacatttataccacctcctctaacactcagggaacaacacagaagggggatagaaataatgtaagagccagatgatagagagaagagctatgaaattccatcttctgtgcatggcaaatttattacaaacatgagctcaaagcagcctaggtatgtgcattgggtctgtataacattggccatgtcaatagtcagatatgaatgggagtgggcacatggggccctatctctccctgctgaactgctagctggtgataaattctgggagatataacattgtcttcatgtgcatacccactggtgggcccacctggcaattttaaccattgtatatgtatatgtatacgaggactcactacttcctgttaaatgttgccacaaacctaaactgctcttaagcatgtatataaacacatctctgtgtatttatattaaagtatgtctatgtgtatgtgtgtgaaacaaaattactttacatcgaagcttacctgtcatcgttctgttactgtcctgattctaaggcttgatgggcatatatgtagatgacaagaacctgactgggccaagggttctctttttctgcctggctcaatcatttgtccgtgtgtgtgtgtgtgtgtgtgtgtgtgtgtgtgtgtgtgtgtgtgcatgctcatgtgagcatgcaagtttgtgtatatgcctgcacaccatgtgtctgctatttctggaagcctcctaccaagcgggttcccacactctggctcacgaagcatctgctcatccattggtagtactcagctcacagctgccactgtgactttccagcctgctgcagccaatctcattattccagccggcacctcagtgaatttctgggtagttccactcatgcttacacactgagcttcatcgaccttacgacacctgtctgcaaccaaatcagaaagggagaaagcaatgccagcagctccctttggggtgcagaggcaagactgagaactgggcaggttcttgtgcatgagtccactctgatgttggaacaacaaacttattttaaaatccgaatacacagtgaaaatcctgcctgctgtatacagatgacaattgttttcagtgtggacagcctgggaaacatcccctttagtgaggaaggtgatgaggcagggctgcacccctgtaaactttctgttatactttgaaactcctcactcttagtcagatgtctcaatgccattctagcatccaacctcagtttttctgtgagcctcactgttcaagagtaacatctctgtaggaggattgtgggattgtggggtgttggtggtggggttggtaaagatggcttcaatagttatacattgatggggatttccagtctaagctgtggtcattcactttgctctccagaaataggctgtccattcacttattgataaagttaagaagcagtgggactggaagtacttccatggcagtgagaacctcattctatagctaatgaagcccacgagtgggaaggcggtccgtagtcatgattatttggaagcagcagctgttcgctagatctcattctgaacattcttcccctctttcaacatagtgccaaggtggtcacgcacaaaggggacatgtatctagcaagaggcagacctactaggtggtctggaaccctgaaccctggaacctttccagggtgcacacacatgctagttgcacatgggtatttggaaagagactggcttattgtttacccaaatcttgaattagtcctcacatctatgacctgaatgtctcatttaaataattattatgttgaaatgtgattgacattacactatttcgggaactcgatagagtggcacagggtgagatgagggggttatgagttcaaagccagctatgggagatcctgtctcaaacaaagcaaaaacaacaatgataataatacaaggagagggaaaatgggctgggcctttaggaggtgattaggatgtgagggctctgcccacacaaattcattaagcctgtttctgcaggatggggttaggtctcaggtataggccctgaaacaaggatgctcaacctagcttttcttactgccttctatgcacacttttccaccatgggataccacctttgccatgtgccatcagcaggaagcacacaccagatgccaccaccagactccagaaccataacaaatcagtctctgttctttttcaatcacccagtctcaggtactctgtcacagtagcagaaaacagactaagccgcttcaaaatgtaaaattgtcatcaaaaactacattgcaagctctctacatctgatctggatgggccatgactatgtctcatcaaaggaaggacagcagaagtggcatgtcatttctgagccaagatgtttatgcagtcaactaccatatacgtatacatacatataaatatacacatacacatacatacatacacactctccctattaactagatgccgaagacgcagggaagtgaaagatagtggaaccgcagtgagaaatagccccggatccttaataaaccatatggagaagacattatcacgccactgttaggaaattaacttttggtgtgtgacggtaataaaaatgggaaggtattatatattggtctaataaatcactgcaaggaacatttcagtgagtccaggaaagaagtaattgtctcagcttttaaaaaggaaatgagtattattacagcttgggtatgaagtgtccccaaaggctcagttgttaaggcttagtccccaggaggacatgttcagaggcaggggcttggggttagatcatgatcatgccaggcttaacagcgggtggttcagtactgaatgggctgttaggaaggcgggtccagttggaggaagtaggtcagggaggcgtgtctttgaaggttcatcttgtcgtcacttccttctgcttctctccactatacggcgaaccacctcactctactgtaaactccttaccacgatgttcggcctcacccacagctcagaaacaaaagaagtgagtgactacagagtataacctctaaaactatgggtcaaagtaaacctttttttcctttaagttgatttctctcatgcattttgtcacagcgaagaaaagctgactagcaggaatatgaagaatagcccttttatattgcttctaacttgagtttattttagtgcttcttttattgtttctaggtgtgccatatccatagccctagaatgaatacatacacacatacacacacgcatcactagttgctgaattcctgtcatatatacatagatggcatgctctcctgaattcttgccatgaaagatgaacagttagttgaagtcttctttttccttctgtcacctaacgcttaataattatattttattggctactttgaaatttttaaatatttttttaattagtatttttggcttcactgactgacacatcctcccatctttccactttatttttactgtctggcctcctatctactgtcaatcacagttttagactttactcttgtcaatctaacacttacaccctgtagccacaatccagtcttctgttcttaagtgcagaggatggctcaaaattctggaaacaaatgcacagctttgctttaccatggctatgcagataatatccatctgtgtggcatggagattgctctcactatattttggtcctctaatgtcattacttctatgtcaatcaaaaggggtttcctagcaccaagttcaaagagaattcccctaaatttcactgactcctttaacatgctgtggtgtagtttacttaacagttaggtcatgattaatgtgaataatttttatcttaaaccccttggtcattcttctaatctttcatcctattggtcaaaagaaagaaaaagtatgctgtcatcatgacgtcaacttctctggcatctcagtcaaatagagtgggtgatggatctccctccatcttcatggatgtttccttttctctactaggtcaatgtcctgtctctgagttagctcacagccaccagtcagtttccagtcagtagtctcttgatacagcactttctgagtcccttgagaattaatttctttctttctttctttctttctttctttctttctttctttctttttttctttctttctttccttccttccttcctttctctttttctttccttccttccttcccttccttctttcccttcttttcttccttcctactttccctccctccctccctcccttcctttccttccttcttcctttctttcttcattctctccctccctccctccctccctctctccttccctacatcccttcctttcttttttctagagtccatctcaaactttctatcaagttccgagttcatgaatgtctcaaagggcttggatcatatccttacatccagctgatcactgatcatataactacatacctaccacttgcttattgcttgaagtcatcgctcagctttgttccaacttgcttacaaggacatcacctggggacctctgcaaactgcaagctttgcctgtgggcaatcttgaaagaatgatcccaggccatactggtggtgtctgtagagcagaggcccctgcaacccgaagagcttgcctttcctgggctttgagaacactctgattacatttctgggcagacatcagtgcttctgagatcctcgaattttcttagcttttttctggttcaagctttcttgctctctttccccctctctctttatatcctgttagactttctatcttgttttccccaaaaccattttattgaagtttggagtccatgttcatttactgtctaagagctgtacctttctctactgtctgctttacatttcttctttttaaggatattatgagctcttggagctctttgaacatatggacaagaactcccatttatcttagagactcctggcttgtctttccttccattggagttttagtctttcactattatgctgttactttcccccatgtagctcataattttgggtgtctgttcatgcagaaacaaatgatcaggcgggtgtaggttatcttcgatgtacttactaatgtcaaactttgttgagatagccactcacaatcattaggctttctcacatctatgttttgagaaatgttctcataggcatatgccatgatgtatgggtatggtcattcgtatgagagaatgtccagagaatgatattaagtggctaagaatagtacacttatattatgaaaaattcaaaaatgtgggaaactagaaagaacagtgttactatcctctcactttgattgtgagggttgatgacaggatgaaggccagttgtggtccatccacactcctccccacttgtcgtcccctcttggattagaataaactaaatgcaagaaattcaataatttcatccggttgaataaacattttaatagatgatgtgtgtttgagtctgtgtgtgtgcgtgtgtgcgcgtgcgtgcgtgtgtgtgtgtgtgtgtgtgtgtgtgtgtgtgtgtgtgtagggcgtgtgtgaacatgtcatagtgcacacagaaagattgtcaggctgactggcaagtgctctcactgctgaaccatcttgctgggcccaatacacaccttttgtttcggtaaagcaaacacaaaatttagcattttaaccatatgtaaatggacaattaagtggcatcagaggcattggtattcttgtaaaattcccaacattatgttacatatttatgttgtaatagtatagacaagtgacttccttgattcttagcaattcctgctgactctgaagagtttctctttctacacaggtagcaatgggcatgattttctttttttgtttcctcggtaggaaaaggcaggaaaaacttcctttattccctaggttctaaactagccaagaaatacacaggagccacagaaacagggatgtaaattttcacgtgaagagctgggttgtgcagcctgtcttcagaattgtgacggggtctcagtctctatctctgcattatatgggtatcctatgtaatcactgagagatctgccaccacagatatccctcctgggggcagaagtctcagaacagggctatgaatatatgacaagcatccttgtggggagaaggagcatggatggcaccatgcccccttagtctctttccttaaacttactaccaatatactcctttttgggatgagggatagggaaaggcctggaccacaatgaatcaagactcaggaaaatggagttcccttaacagatgttgcaaacagacttaatcctagctagtctggtgaggaatgttttaacttgattttccctgatggttaacaaggaggcctttgtttctcaggttgtctattgtatttccttaaatggcctgatttttagattgactttttaatttgaaggaggtctttgaatattagagatattaaagttttatctgtcacatggttgcaaatttttcccaatgtgtcattgtctgtggactgcctttgtagtttcttcctccctccctctctccctccctccctccctccctccctccctccttcccccctcccttcctccctccctcctttctttctttcttttcttttttcttcatttgtatggatgttttgcctgcatgtatgtctgtgctccccatgcatgcagtgctcatggaggccagaagagggcatcagatcccctgaactggagttacagacctagttgatcctccctgtgggtgctgggaattgaacccaggtcttctaaaagagcaaccagtgctcttaacccctaagctatgtctctaacctcctttgttgtttcttttcctctagaaaaacttattttataatgtcactgagaaaagatgaggaatgccttgggaataaaacccagagcttattggatgtactctggaagtttctggaaagagttagaagcttcctccccaacaactgcagtaaaaaagacatggtgcaacgatttcttccttttacctgtggttgacaataaaaacctcattaaaatctctgagtggttctagctatccatatgacacctggccatttacatgggcagaattataaaatcaattgaaacagtctgggaagtgaatgaggccacttaaatgattttaatctactgcactaattgcacctaaagtgcctgaacacttttctcccaattaaaaattctaattaggcattgacacctttaaaacactctggagagtgtatttgtgttatgtgcccttgtccatctgacgtgagaggaagaaaggattctcttctcaaacccatgggtcaaaggacaagaaagacctttagcattttcctggtctaaactccctgcttaaggcatgttgagaatgggaacagggctcttcctctatattctctaccccaagccaggaccagggcttttcgatatttacctacctggcatattacagggctttgtcaaagaagtttctggtagtgtgactcgaagtcacatgactagcaagtgtcaaagctgctctgactcctggtctagaactctccattgtagcacacaacatgggctttgaagtaagaacatgcaagtttaaattctagctttgtcacttataagatagattccttaagcgagatccttgattcttctgttctctctgagtctctccttaaacttggctctgccttaaactctttctggctcagctctcacccccctgctcctcaggtgccagttttttcacactgcacttaacagttgggcagcaatgtgacacagtcaatcacaccctgtctctaggagcaggactccgtcttgggttccacatcacttggttcttcttggcttccatagctgctcctcgcctatctcataggccactccctcttttcttccaggcctttctccactgtaggacccagttgtggttcttagaccttttaggatcttccaggcaatctcagacatgcttgcttgttatctgtagtgacaaatctcaggttcatgttgacagtggagacccttcccctggactcctcttgataaaaatctgtctccctaacatgttgctatggataagtgggaagtgcctcccacaatgatgtgtaacagcagacttctgactttctccttctaaacctattctttctgttgtcgtttccatgactattccaatcgctcaaaaccttggcatcaccattaagtcctttccttcatactctagcaaatctgtgagaaacttacatcatttctaacttcagacttgaccaaggatgaaccaaactgttcttactcctttattacagtcccctccgtctcttgccaggagatggccaattgagttctaggctccagcaaccgtgtctaaatgtaagttaggacatatatggcttctaatgatgcaacgatgcaccattctattctcattgacctttgacctcaatttctacacacacctctagccacagggacctccttgcaatttcatgaattgccagcatttcctctgcattctctgtccctctgcctgaacttattgtccccctgacaagacatacaactttgttatgggcctgctcaaatgtcaccatataagagaagaagctccctgaaccacagtcctcagtaccatagctactttaacttgttacctgacatattacacattcgtttaactccctccctcatatatttttattacattccacacaccatgtcccagaggaatagtgtgtgatacttaaccagtgctaattgatttattattattacagtacaacacagggcaaggtgcataccctagaagattttaaacagtacaatatggtgttcttaactataagtaagatgtacagcagagctctgggcatcgcttactttgtgcattgaaactttctacccattgcatgactttctccccactccttcctaggttctggcagctgccaatctatcctttccttctgtcgttgactacactggattcttcatgtaagtgaggctcgaagtatctgtttctctgtgactggcttatttcacttaaacagggtcctccaggctcatctgtgttgctgcaaatggcaagaatgctattccactgcatgtataaattttatccatttctccatcaatgggcatttagtctgtttctgcatcctggctattgtgcatagtgctacagagaagaagagtatggctacctctgtaagatctttatttcaattcttttagataaatacctagctacgaggttgctgggcaataagctaggtctatcacattaaaaaataatctctctgggctggagaggtggctcagtagttaggatcactggctgctcttccagaggacctgggttcaattttcagaatctacatggtagcttacatgtaactactgttccagggtatctggtacccttatacagacacacattcaagaaaaacactactgcacataaaataataaacgaaacatttaaagaactcctttacatttagagtgaccattctaacatgtgtgagctggtacctcattgtgattttgactggcatttgtcagtgatgctggacatccttttatgaacctactggccatttgttccacatctttagagaagtgtctattcaagtgtttccctcatgtttcttattgttgttttcttgctattgagttataggtcaataaatatttttgagtgaataaataaataagtctccagttaataatgactaaataaacatattataacgtacttaacagcatcagtacactggaaattacagaacaaatccctacagttaagctagaaggagggggaggaaagtctctggtacaggttctagtacaaagtgcaaatacaccgcagaaaagcaatttacttcttgaattaataagcatgctgacatttattttcttcttagcttcaattaagagcatcttgcttagaagcaaggtgaacatatgttcctgctctctaatttaaaataatcccattttgataaaatatttttgcaaattgttttagagtgtgacaatttatggcagagctaataaatatgtgcaaacagcacagctttaaaaattaagaactgcttagagaagtctaggttcacagcaaacttgaactagaagcataacaagcttacaccacccttctccacacctacccttagccttctaagccactgtcactatcaccaaagtttgctacagtctatgaaccacacctgcatgcccatggcttaccccggggttcagacttattgtgtgccctgtgagttttgatagatgctagagcgtgtaccactgtcataacatcaaacagcacatgttcactgtgcttcaagttctctgtgaccttccctcttatccatccccttacccagctgctaggaaatcactgacttttatcggtcttgatagttttgccttttccagaacatcatatgcagacaataccctccatgatggctgacttatgcttttctgactttctgattgtgtgagagaaatacgcatgctgtaaaaatagtactttaaactttgcatcttggtcccttcccagtgtagcgacagaaggtacatccttttgcagatgctggggcagcacctgtgaactaaagttcccaggaagccaggagatccacagggaaactccagcactttgtagtgtgttcttttaccaagcaaggacgtttagcggggtaggagcagtaaatgcattgtggacttaacactcactgcaactgaacctcactataaattgagaaacacatgtaactgacccattagtacatgagttttcagactggcttcttttgcatagaaatacacactgaagagtcttccatgtctttttatggcttgatagctcacttctttttagtgcagaatgttaattttaaaatccatgtgctaattgaaggacatcttggctactgaacattttgtcaattacaatcattgctgctataagcatctctctttgtgatttctctggaaacttttttcaacacatttggacaagtgccaagtggttaaacaatggatcatatgtacagtaagcatatttttagctttgttaagaagctgccaaaccatcttccaaggaaggttacataattttagtcatgttgagtgcttcctttggttctcagaactatccaaatttaggtgttagatcagaccgtcactgtatttaagatagataatttctcatggattacagaaattccgcatttccctttagtgtttctgtggttgtatttctttgaggcaaatcaaaatcaatcacgaatagcaattcctcttctgaggatgactagggaggagagagagggcaaatgagcctgtctcgtttttcttccaggaacactcaagacagccaactgtaccttaggctgcaggcccattgcctcaaactgcattacgttcacccctttctccaggctcaagttcttccgctagggcccaattatcaccgtttccttggtatctatgaatggcaccccatgggtttcaagcagcccatggtagtcctggggtgggggtcgatatctgatgaacacagagaacccccgacagttctgaccacacacattgctgcagcttctggcccctctgccttcctcccccatttggctggcctccctatctgctggtgcaacacagcctgctgggcatctctgctttttcactgctgttggtttccccactcagaagggggaaagaagcccagagaccatcaggaagcagagtgtttataacctgcaggaaaagcctgatcttctgtccttcatccttccccagcctggcccacttaacgatgcttaacaatgccaccatgcttaacaatgcccacagctgtgctgacacaagcgcacatgctccgggctgtgaaggacctttcctgtgttccaggggctatcctgtatgtttaaataatttccatctttagagcagttctatgaagtggttattgcccaccttcatcttcaataggaggaaactgagaaacaggtagcttgagtgactctcccattgtcccacagcagctgagtggtgagactggggtgtcaacttggatagtttggcttgttcttgaatactgaacactgaagccacgcgcttctccgccagaggagtattttacaaacaccagtgaaagctcattaatttagctccaaataatttgacataaatttcatgcctcttaagctgagcttccttctggataaaacaggtatagacacagtgcccattgcctgtcacaagaataaaacaaagagaggtatctggggagctgacaccctgtatcaagaaactgtatgtcaatgcttcttgaactatcacttgatttgattttgatttttaagctgcaataggccttttcccttttgcaatatccatgaaaagagtccatgaaacggtgacatcagtgctttcaatacttatggagagtttaagggatatttttgaaatactttgaaagcatttgctcacatttcaaccatcaccatacaaattgcaagtcatgcctaaatattccttatggcaggctgcaaaggctctttgcatatcagctgtttgttggccgagttcctgttactcagtgtggctgaaaataatacagtagtcactttaaacattctctaagtttcagaatgaacatcctaccaatttgttatacatatgcatctaatacgcttccacgtagccaagtgtcgtctttagacatgttcataataacacaagcaaagagggaacaaatgaaaataaaattcacatggagagctccctgttagccaacatagatccacagttttagggcctatgcctcacactggtccttacacactggtccttaaatgctgtgtatgacagaacttcacacataagaatgaccctacaatcagtgcctagtgattgaaaatgtatatgatgactacaagttgcagttaatttaggaacaggagtttgaactgcctgaatccatcagcattgatacatatatggaaagcatctgccctcatcttctcacagtacagtcctgactcagtcttcagagaatggtactcatgtagctgcttcaatgaaagacacatggtgaatatgactgtccatcttcccacctgtccattctcacccaggcttgggctcacagcctagaaaccaatgtgaggttctccagtcagactccaagacaccctggtggctctgtagcttattgcaaatctcctttctctagagctgacatcccaagggctgtaaggactggcacctgccagctcattcactccacctagacttaggcaaccaatttgtggtgggactctgaccaatgggaagtcatagttccttatgtacaaatttaacaagggcacaaagacttaaagtctcatcagggctcagtttctgaacagaacaaaacctatgaggagctgtatcttatccatatttggcaaaatgggcttggtgggtgagctactaggcacagagctctgaaagaaagagagaaaggaaaggccagatgagaggagctgcagcaaaacaaaacaaatccaaccccaaatctgaactccaatctcaaactgtctagtccagtccctctgatagccaggctgcaatttgactcttgggacccataagacacatacatacccttcaagtatctcctctcagccagttcctttccctaagccattttttaaaaactggtttctattgtttgcaaacaatagttctaagcaatagaaacaagaacacagtcttggtgagcaggaaacagcaccgacgcactggaggatgatgacgaacatacaaagcttctgcattctttggtcttgctctttgccgtgcctttgattggcatctccacttagagaacacagcgaaggcaggaaccaagcccctgctaggattcgtaacctctctaaacttacatttacaacgagatcattctccagcctccagactctcactatgttgggctcatcccttatgtgcttttcagctactagaaagagagtttgaaaacaggatgtgtaagccaattagcttaccgctgagtgaccttcaacaaattggtttttaaatgtcatagaagacccaggtggaagttacttcttccgtggaaataagaaacatgtgaagacttatctcagctgccgcgggccagaacaatgtctttattctatgtgacatgcattttctaatgtatgatgaattttgaaattataaagatacatttactccccctgctccccggtgctgaagacagaatttggggccttgtttgaatttgctaagcaacctctctagcactgagataagtcccgaccccaagacaaatttacttcacaagttcacagtttagactgagaattctgcagttcggcagtatgacagtgttgtttctatttgggggtatcatgtgtactttctggcctagattccatttcatcatcatagaaatcagtgctttgcctttcagacaaatccgcaagacttggacaaaccaaaacctgttgaacagatcatccatctgccatactgtgacataaccggccaactcatgctggagtctgagctccaggccacagttctgttccctgaggaattgctccatcaggcattctgcctgggatgctgtggtttaattagagttggagacttggggcgggagagtatataagcctcactaaatggtctggatgtccatgggaggctccctgtgaacatgaccttctctgagctggttcaagcgcaaataaaacctgggttctcttaccaaagaaggggaattagaaagagaagaatggatatcaacaacagaacattaatagattttattaagcaccaccgccctgctcttgagacagggtctcaagctataacctagtgtgatcttgaacttgaagcaatcctcctgctccagcttgcatgcgtgctggaattacaggtgtaagccaccgtgcccagcttgctttcttcttcttcttcttcttcttcttcttcttcttcttcttcttcttcttcttcttcttcttcttcttcttcttcttcttcttcttcttaaaaataaattttcaatttcttttattatacttcaaagctagagctactggcagcgttctaaaacaagagagcccacacagccttggccaggctcacaacacaaggcttgaagaagaagaagaagaagaagaagaaggccttcccggtctcctgtacctgctttacttgcattgcagctataaccaccatgtggggttcctcctcaggaaagaagtgcttggctaggcagaataacagtgaccacagctgtccacatcaaatgctggggctcaagcacatgctgccaggcatcatgcagggctcttgtagtttgggggaagggagtagattctgagatgagaagattatcctggatgatcaggtaggacccagtttaatatggagcccttaaagggagacattttccagctgagttagggtgagagaccaaagaagcagcagaggtttgacggctgaggccagcttgacccacaggtgactttgaggatagtggaagagggacttcgagtcaaacaatgtaagcatctgagaattgccctctgatgacagccactaggaaatggggacattgatcctacaacctcaggggactgagttctgccatccagaatgggcaaagaaatggatccttcctgaagcctccagcaaggagccagagttcctcccagtttcagttcagacgagcctgggtcaggttctggctttccgttctgtaagctgatacatttgtcctgtttcagccttaagaatggagtcatttgttacagcagcaatcgaaatgaatacccatgggcagacagaagcagctgttcctgttttagtgcaggtgataaggaaatgcccttcggtcttcacagaacaagctaatgggggtgaaagctcttaggggtacctgagtagggcactcaagacaaaaggaagtagggcgttcagaacacctgagtgcatttcctgctctgtcttcaaaataagaccagaactgtacatatttgttcattgaataaaagaaactctggggtgcacaggggtgtcaggcccagggcaggtaggtgaagtaaaggaacccagtggggggttgtgatgcttgcatgtgggagtaaagaaaacataacatgcccaaagctcttcaagacaatatgagttaaagcataacatcaggaaaacagtcccaacaaaaggctgaatgaagctgtaggatcacctttcatttctgctagagccgtcaggggaaaaaggaaaccagaagataacgggggagtgggggacgaagggaagaagcatggaagggtacccaaaggcatacagagaagtgggagcgagaaccaaaaccccagaagagaaaggccatggcctcaccatgttggaggctgcctcattccaatggcatttgaacatagatgcccacagggcccgccgggaggtgatgccccagtttgaacatcctgctcatccccggctctccacaaagtcgtttgaggaagacaaggtcatccactttagatctacccggagaagaatgagcccttgtggaagcagctggtgagacagaaaggtagtgggagcctcggaaggccggggctgtgggcacgagacctcctaaaggaagggcagagaaacagacaagcttgtcttcatggagggaaaggtgaaacagagcacacggggagccccagggagaaccccaaaagtccatggggctgagcaggtagaaataacatatgctgcaataacatgccatggctaagcgcacgtccccagtctgcaactgttcttaaagcaaaagacaccgcatgggtctccgtagcctgccagtcatctgagaggctggttgtgggaggccagtcaccctggctctcacctagcacaccacctcaaaccctacaaggggatagcagcagggacagtggtagtgaggagcctcgggccttttcatcttcttgcattccaacccccttccacctcaggtcctcctcaaagctacaaatctcacttcccaccactttacatcctgtcaggactcatgaatttcaactctcatcactactcagaggtgccaaggttttgccctcactgggttgtgagtgacctcttgtggtgggcacgtgtaattgcagagtgagtgaagtacctcaagttgaatttgattcctgttaagccagtatccaaaaagataaagggaaggcagcttctaaagtaagtttgttaaaaaaaaaaaaacaaaataaaaaacccaaacaacaaaaaggaattgcttgaggtgactataaacctgaaactggggcctctgttaaggcagagaagggataattttccaattggtttttaaaacacaagattgatgcaaaaaatcttgttgcatctgaggcttcaaagaccagacatcaactctagaactgagcacgtgaaaattaaagtctcaggctcagcctgtacacctgagaaatggaactcatcatacccaccccacttgcttctgtcaggggttccttctgtacaatgtgaccagttgcaaacagtgttgcctgggttggaccttgaatcttttggttcatgacacaccccaccagtggtcagagccacgcctccttctcccaaccctcctaaatgccttcagaaagtttccccccttttttcccctcagctcaacttgaattcacaacctcttctgtcttcagtttatccttaagagtatcagttagttcgatcatgcatacgggtttttactgggcatgatgcccggtatattatagagtataatataaatcatatattttattacatgatcagatgacttttaaaccatccactccttcttccatcttgcatacttgtcttaagtttctgtgatacgtgtgttgtgtggtaaacactaggaacacgtgggctgaatggaacagtctttgcccttatggaacttatagaacgtacaattaatacaaatatatacttggagttctgaaaggggattatgaagggactgaacaaggtgaatatgcaggagaggggagaatgaatatctagttatctggggaaggagaagcatccagagagagggaagagcacgctcaaagtttaaaggtcctgaggtagactcaaagaagactatcagcttaccagcatctacatgtctcatggtcatgtgtatatgctgtactgactgtaggcataaatacatacggacaagtatacacgaacaagaggaaataatagagatgaatattaacatcttgtcagaactaatgtgaagaaatcagtgttggtgtccaatgtgctcagataatgaactgcccacaaacacacccaagtctccaaccaggtactcggtctcagtgacagatttcaggtgatgtatcctggctactctgcctggctgtcacaagttagggttcacgggaatatgcggggctttggagtgtaatctctatattcaaaactaacaataccatgtctttgccatcttattttagcctaaccctgaatcaatgtttttttcctttcttattttgctaccattattattttgtcccagaacatagtctgggtgaccttttatgttgttgttggaacaaaaatcctaattactctgtgttgttatgaagtctcaaaggccaagaggttccatgcagtcttttggtgcaaaatattgtgtaccaggaaatggagatttggaaacactttggtttgtaaaagaacctggtgtagagacagttgcaggctcactgttttccttaggtaggtgccttagtggctgctctgctggagatgtgggctttgtgcttacagcagagaggtagagacacacagaagggggcagaaatgactctcaccaagagactgcagtggaattgttctgatggtttcaggaaacacatggcccaaggtacataaagagttggggatggaggttcctgtgaatgaggaacacagctagaaaggcagcatgaataagacagtacaaatggcttctgctaccccagcagatggtcaacagatctttttaaccatcatgaaggttttgaagagtaaaagcgaatgaaaagtattagtgtccaccttctaggtggtcctcataagttgggtggtgactgtgtctagactcagcttacatgttgcctccaccctcaaatttcagcaaatacacaccccagagcaaatgagagcaaccagttgatggctcattcttacacacaaaatgaagatgtcctgcatgaaaaatcaatttacacggagttcaaacacacacttctgttgagctccaggcaatatattctgccccccttctcccatggagaagtttaacaagtccaagttgcaaagatgaatttacaaaacaacctgttcttttctccagatgaaaatagtaacgcatccaaagagacattcaaaaatcagtgtcattctggaatttaaagcacatatgccctctagctgttgaagttagtattgtttatattgcgtcttatttcagagcaaaactttaaaaattatgaaataatttattcatactgtagaaagctaccttgccaggttttatttagttttaagatccaggctcaatggtacttacgtttttacagagttcatattctataaatataatagaattttacagaatctatcaatataatagaatttatagaatacaaactctgtaaaatagaaaacataatttaccatatcagtggttataaaaacataaaccttgtaaggatctgtctttttcttttaatttgacttttatatgtattcgtgttttgcttgcctgcgtgtctgtgcaccaatgtgtgcagtgcccaaagaggccagaagagggcactggatcccctagagctggagttacagatggctgtcagccaccatctggatgctgggaatccattccaggtcctctggaaaagcagccagtgctcttaaccattgaaccatctcttcagacccaggagggctcttttcagagctgatgtcctaccttcaccacagccgtccttcctttcctgggcaccattataaatggatgtgtgagttacatgctgtctatgcacagactgtgactatacagtttggtgagtttgcctgtgcatgactgcttatccttctatctataaatgacagggtgctgccatcaccccagaaaacagaaaatgttttgcacttttccatccagtgccccgcctgtaacctgtatatgactcccattgtatctccatcactgtagattacatttacttattcctggatgtcattacaatggaatctggcagtaaatattctttagcatctggctccataggctcaacagtaatttcgaagatttccctatattgttagatcaaacagctcctcagatttttttttattatggactagaatactgttgcctgaatatactacaatttccccatccatccattctctcagtaatggatatcattgttgcttcttgtgtggatagtgtttctgatagatcttaatggagttgaagactgggctagatggccataagaaattaattgatctgggaacatagtgagagagggggtggaggagcttttgagagccagagatcaggagacctgcttcgagacagtgtctgatagaaacatctttggccaggatatagcacccatgaaatttgaacaatagggtttcctcaacgaaacctacataatgactacagcagtcgacacaccaatgggcatggagaatatttcacaaggccccacccctagatgaagaactatatggggagaatcacttattctagatatgagagccctgataggttatctaatcccaagtagccagccctagacacatgtacatgtgagcaacactaaatgtacccaggaggatatatatgtacacacacacacacacacacacacacacacacacacacacacacacacacgcaaccataatagttatagaaggaatcgtgaatctgagaaggaatggggggaaggagttggaaagtagagaaagaaaggtagaaatggtataaatacagtgtattcatgtctagaaattctcaaaaacttattaaaaagttaaaaaaagaaatgagctgataattctaacttatcagcatagatatttttacaaattcttgtggattctttattgcaagtttctggcggaaatagaacacatttttgttacactctataaagtgtctgaatcagaattattaagaatccagttcaatctacttggttcagcacacaagtgtggatagagtccattctaggcctgctggcttttctgataaaaaggattctctctcctagtctcagaaaacaacagtgacctttgagctttctcaccgggcgaggcatgctaatgagcagaaagttgtggaagaagtgtgggtaacctataaaaactcctcattcagacaagaaatttaatcaatgaatgccattcacaacgtgcagctttaaggtcagtcaataaggaacttattcaaaggcctcctgcatacaatgttagctaagatcatatgtaaatattataattatcatatgttgactctggaatatcgcatggattatctttgatatattcaattcgtctgtgctgataacctagtaataaccgcatgttgattcttatatgtcacataggatttcctaaatcctcactacttcgctgaataagtgcacatttcccccacatttcagaggaagaatcagactgagggcattaggtaaactagatcatattcttagtgtctaccaaagccaggctttgacctgagatgaccacatcccaaagcccatccataatttaccctaagaccccaacaacttggcatcccaaggattccacttgttgaagccatggaaatgcagctggctctctcatggtgtttaaggcctcaaataatctctattccaaaagagcagtacacagaccccagaagtttctatcggcacacaactctttcagagaacttaaatagacaacaaagatgtttctgatgtgcagagaggacagacaccagcagtgctctgtagcacacagacacacaaaaataaaagacctagagatagatattggggttcaagcttcaagctgaagatcagaaaagcaaagcagacgaccactagctcttacctctacctcaggatgaaatgggcagatcctgtctccatgggttcttaccaagtctcagactgctgcctctcctcaatgtggctggagaataatctcagaatgccatctctgagaccctgttcctgtcttaaatacctctcataagtcctgggattaaatgtgtgagttttgttactctttcacactgactcagactggtgtagccctgggtggccttgaattcagagagctccatctgcctttgtctcttgagtcctggaattaaaggtgtgtgccactactgcctggtttctacggctaactagcatgactgctttgctattttgatctccagaggctttaataaatcataaactatgtatcaccatagtgctctcagtcaaaacatttcaatttttgtcttcactacattaaaatagaatgattttgattgtgggatttttgtcattgtctttaaaatgggatatatactttaaaaatagcttggaatggcagctatttttaggttgaaaacacatgtggtgacgacctcagatcccaatgactagcttttgtatgtagtaagaacatctgtggagaaatcagttcccttcacaagatgatgtgtcctcaggatgatatgtcagcaggtgatagtgtggagaatcagctgagagagctattgatgactccagagttttgaacatgtcctgggaaggtgccatttacataatttaagcatctagagctaagcaagtcaacagcagacaagaacatcccatcattggacaatcattgtgcttgcagacagtccacatttttttttctaaacagaagtggaaattataactatcatccatttattgaggggtcattgaacaagtttcggtgacatttgaatgttgttttccagtgtatgacaggaaccaatctatagcgctgagttgttcactcagctttgaaacagtccttagaccagtggttctcaatctgtgggtcatgagtcccttggggtctcatatcagatatcctgcatatcagatatttacattatgattcataataatagcaaaatgacagctatgaagtagcaatgaaataattttatggttggggtccccacaacatgacgaactgcattaaaggtttgcagcattacaaggttgagaaccactgccttaggctgtatgaagggaggacaaaaggaatggatgttcactctgagctgaacgccacatatctcctaatcacctatctggggaagtgagcagaggaaaccagggatacctaaaatatcatttttcttttccatagacatgttttctgggttacaaaacatccccataaatgggtgtttgatgcctaaaatttttatagctgtgcagcaattggctcacccactaccatcatttaaaaaccatcccatcagggctgaagagatgactcggtggttaagagcactggttgcttttccagaggacccaggtttgattccaagcacccacatggcaagtcacaaacatctggaatgccatttttgaggtatctaacaccctcttctggcctctgtgggaactgtgggtactgtatgactatggcaacacatacctgcaggaaaacagctgtacacataaataaaaattttgaaaatctagaaaaaaattttaacaacaaaaatatgatcatttagatgtagacaaaggtgcagagagatagggatatctcactgaatattgatattcttgggaagtattaaatagtagaacaattagcaatataaattgctataggtataaatttagcaaattatttggcaatacaaatgaaaatttatcattctaacaaaacacatcaaaaattaaatgccttttcatcatcatctcattatcgtgtgtgtgtgtgtgtgtgtgtgtgtgtgtgtgtgtagagagagagagagagagagagagagagagagagagagagagagagaggtgtacatggacatccatgccatagaaatcctatttgattatcagacatgctaacaagtgtgcctttaaccattgatccatctctctagctctacaccttatttttgagacaggatttctcactgaactttcaacttggctttttcacctaggctggtcagccaatgagctccaatgatccacttgtctctactaccctacccctagtactggggttatagatatctgggtcttgtttgtgtactagggatctgaacacaggtcctcatgcttgtacagtaaacaccttacccattgagtcatttcccaagttttattgaaagtattagaaataagacacctaaagatgagggcgatttcgtcatgcttgctttaattcacattttggtagtctctggtggattgggcagtttctcaatgcaccctggctatctgattttctcgttagggaattgtcaagttttctgctcattcatgtggtgtgacctcagtgttattcataaaaattatataacctggttaaaaagtgaggctattgtccacttaactgtaaaattttgtatatgatgtaggcacctgattaatctaggctaaagttgaacttaaattgacgaaacagtctatgtggcataaacagagaaaacaacaactacaaaacagtccacttttgtatttataatgtgacatgaattgttactttagaagaagcataagctaattctctagttggggactcagatgcagtgaactgagtctttcacaggacaccctaaagtacagcaattatcatcataaaccccagatttgccaccatcatggtgtatctccaactctgtatcaagtgggaaaatatgaaacatcaattcaaatatgccaatatgtgaaataaaatgaaatttcctctcatcatcaataatgaggcacagcctgccaaatgatcattttgttcacatattaaagtccaaagttttggtccagatataggaaaccagggacatgttgggcatagccactaagatggacagcctgtcagggtttatacaaatgctgctaggggcagcttcgaccaggtaaagaattccaatgcccaggctgaatgtgtgaccaagtgcagttatgtttcattgctctgtgatggaaccaataacatttgttttgaaaagcacagatctgtatactgtatttaatctctagtgacaggactaagatttccctcaatagttgcttcagttcttcaattatagtataaaacaaatggtgacagattgttttattccttttgtgtcaaccaaaacacccacgggatacataatttggtgatcaaagcctgaactgaaggaagttaagaaagactccagattaagtctgatatctaatttgcaaagacagagcatagaagggaaatcagtgaacattcaactaaaatattcttaggggatccatgctaagaactggaatcatttcaggcttgaaggaagctacctgtgggagactgctgggctactttgggatcattgctttccattggcctgaaaatggagcagtctgtggaatttctaggtcaacaagaggtgcagatgagacactgaagcctaacatagtgaggggctaacctgcatcctttataagtggttaaggatactttgggcttataaattaggaatacctaaatcttgaatggtgtagccacgataatgaatgatgcgattcacacatcagggggaaaaaaaggctgagacaaataactgtctaagtagaatttgtataatcaccgtgataaaccacaggcttattcaatctatggtccaacagtgtgggctcttactagacgtaaatacaatgtaactgcagggagaaagatattaaatctgctcttttacgcgttcagagaaagacttcatccagcctctcccagaagtgaacttctgaggaccaggaagaaagaaatccaaatccatcacagaatatataaaccaaactatagacaaggggcttattccttgccatcatctcctacccccactgacccagcctcctcatttcttccactcctcccaaacaggaaatgcttgtattgtagaaatgactggttgggagacatgtccgttgatgatgtcattccttccttaaagagaactatttatgagtctatcatggagcttgagaggtggggtggtaacaacagcagatgagacgtcttcatcctgatgttttaaagaagaagccattgctatggaacactttggctttagctggctcttgccttgagaggatacctggtttactctttctagacacttcttttgtggccttacacccaatcatattagtgcttgaacgtggggcaggggtctttacacagtcagaagccaagttcatatagaggtgttgtttgaaccatcttctgtctgtctgtctgtccgtctgtctgggctatcatgttcttgtgagggatgtgtgtttgcatttttatgtttactatggcattactttatctaagtgactataaagctctgactttccttgacacatttatttagagggttcaggctcaggacttggatactttcttagtgatttattcctaaaacattgtttctgtgtgaaagtgccccccctttggtgtatgtggagtatatgtgagcacatgtttgggtgtatggatatgtgtgcattatatacactaaaattagtttgtattatgaatattaatttcactggatctcttttctgttcttttactagcttttctgtatttctcttctgatttttaatagagtgatttactattttactaatgacttcttaattcctcatcagtccatgaaaagcagatattctgttactactgtttttgtaactactttaaaaacgtttttaacatcacctcagcgttagacagcaccctgccttctctagagtaaaacaaggaacttggacttttctggctccaattcctacttccttcctccatggctattagtgcgtcaattctatcttgctttgatgccttcccatcgatgtcattattgttgttagtcaaggtttgcttaaatgaaaatacttactccttatcccattcttgttcattattaaaacctattacagacttctgagttctatctcattgtttttggaaatgtatcttctgcagttccttagtatttaaaaaaaaaactgaaattttttcttatccaatcattctttgtaaacaacattcttttgtagaggaggcttgaggtatacactagtgaggtgtggcacatgagtgtgaacaaaagctgttcaggacaatgagctttggatatgtacacagccatgagactaacacccagatcaatttaaaacaattcatttcgccagatggctctctcatactccttgtctgtcagttcccatctctgccactcagatagcaattcctagccattaatttttttcctattttaaatttcatataaatagaaccacacaataattactcttgtttctggccttttcatgcaacacaatgttttttttttttttttttaagattgctgtgtttatctgtaattttcttcttctttctcactgtgtattccaaatcattatcaccctgaagtgatagtttaagagggtatagaactctgggtcaatagttacttttctcatattttgaaaagattattccaatgtctttcagtctttattattgccaaaaagcgtttcctttgaggaccatttcctgtggctacttactctctcctctctaggtttaaaatgcttccttgttctaaaattctaggttacatcatggtgccaatttgctttaggtaatacttaaggacttcacagaagtcaatgtgattcatcagcctatggccttatgaccctttcataagcccacctcagacacctgtcccaggagggaagatgtgaactcacatagaataccagttcatagcagagtgtgatgaacagagatttaattcctcctcttgagaaggaccagaaggtgctcagcttatagagtttatattgtgtgttggctgtctgaatgcataagtcaagtcctatctactgcccttagggatgggacctaaggcaggcatctgtctccaggtttagcatccctcagcaccatgacctgtctggctcctctgaatttccacttcctttctcctacctggtgatttctttctttttttattaaaaatattttatgtgtgtgggtgctttgactgcatgcctgtctatgcaccatgtacatatctggtaaccttggatgtcatcaggagagggcatcagatgatgccctggaactgaagttaatacagaggattgtgaattgctgtgtgggtactgggaatcaaacctggatcctctgcaagagcaggccttgcccactgagtcatctctccagcccttctttttctttcttttagtctcaattatcatgacactaaaaacaatatttgaaaaggtttaaccaatttttacaattctgcatgaactttgcctaccatgccgctagaagctgcatgtttcccttactttgtgccttttacctgtagacttgagagtgcttaacagtaaggtttccataggtaaatcttggtcatttactaccatagccaacttgagcaaaactgcctgttttttcctctttcttttttctttttcttcccctcccccttccttccttccttccttccttccttccttccttccttccttccttccttcctttcttcctcccaccctcctcccttccttctttttttgtttctttctttgagaaaaggtttctttgtgtaacagcaatctctgtcctgcaacttgctttgtagaccaagctggctttgaactcacagagatctgcctgcctctgcctccagagtgctaggactaaaggtcctggctaccacctgactaccacctgctttttaatgagctgggtctaatgctgcatggtctgtgtgcctgatgggccaggctcactgatgcccagtaaactgagtgcagtgatgaaacctttgacttgggccccagcaaaaagctgattgtcttttaaagtcatgtctttgtcctaagcaagttgcttttgaatgagaatagttagaatactgttggtttccagacagccccattaccactcactagctattttatacgagatctcagcctttgtttcctcaacagcaagagaaagacaataaggattcttgccttagagcgctattgtgaagataaaatatgtggttacatataaagcaggtggcacttggtaaaccgtcatcaatcattaatattattaaacatgggaaagtcactgatttagttaatttgcctacccaggaagcacgtagagtgtaagttaataatccagacacaaagaaagatgtagttcatgaaaaggaataaaaccaaataaccaatataataatatatatagtctttgtgtatgttggctactgtggcaaatccttatatgcagggataatttttaaggtcaccagtggatgcctgaatccttggacagtgacatcacatatattatattttctccataaataaatactatataatgtatgataatcttgataatatatgctttatcaattaggcacaatggaggttacaataactaataatgaaatagacctacaataatatactgtaacatatataaatgaactctctgtctctttatctctaaataggctaattcctcattgtactgcatcatattttcacaccatggatgactgtagaaagtaaaaccacagataagagtgactactctaaagtaatccttttcgaatactactcaaccaaagaccatgctcttgtaatttcctcgggtcagagagatcagttaaagtcagggagaacattaaaacagcaagacacagcaatgaacaatgaggcagggtcttgcctcagtgtgtaagtcggtacctcgagaaaggtattgagatgaggaaccacactgaagagtgtattctgcaatggtaggcttctgtgagggtgtgactcacggtgggctcagaacaaagggcacactgaggatcactggctcagtgttttgggggaaatcagaatattatggcgagagtgagccactgttgtacacaatgtgatgccacggttgtacacaatgctctctctcagagtccttcagatggggagtagaacgaatcaccatcatatcatcaagggacatttaacgaggaacatgatgtgccacagacttgcaggctcactggagccttggcaggagctgatttggggctacagtggctctgcccatcctataatttactacttatgggtctaggagactagggtataggtgactgtggttattggacagcaaccatttctgctagttgatctttaacagaaaagtgaggggaaggtggtcattttcctaagttaggttacttgttattttccccaagaatcaaaagttgaaatcatttgctgcattccaaatatagaggatagtttccatgtacactgaagaggaattggctggtccttgtaagtcaaatcaaacattaggtttcaaccacaccaagattgtactctttaacgtaaatatttttagaattttcaaaacactgattttttactgcttctacttgtatctctgctttcatcaaaaagttaactatcaatatagggatgacaaacacacatatgcatatatacatgtatgtatatatgcatatagtgtgcttagtctgtttaaagagaacaaactaaatctgcctaaatagaaactttaaagatatttcttttattattttatgtgtaccatgtgttttcagtgtctatggaggctggaagagggcattggatgccctgggactggagttacagataattgtgagctgccatgggggggctgggaatctaactcaggtcccatggaaaagcagccagtgttcttaactgctgagtcatctctccagccccccaaatagaaaaatttaaatatatgacagttctcttttataatactgattttttttttgagacagggtttctctgtattgctttggagcctgtcctggaacttgctctgtagacccatgctggcttcgaactcacagagatctgtctgcctctgcctctgcctcccaagtgctgggatttaaggcgtgtgccaccaatgcctggctataatactgatttaaaaaaaaaaaaaacaaggaagttaaaaaccagtctaataaaatggtattggcagacaggaacactacagaaaaacaattacttaacacttaatgtcactaccaattgtgtatgaggttgtttatacaatttagtttatttccttgaaaataaatgttttcttgaacagaaattgaaatcagatgacatataaagtcttctgttaagctttgctctggcctttggcagccctaggccaggccatttcttttgtaaattggatccttttccacataaatctcaagtccatattatcctataaaccaatggttcctaacctgtgggtcatgacgccttcagggaatcaaacaaccatttcacaggggtctcttaagaccatcgaaaaatcacagctatttatattacgattcataacagtaacaaaattataaagtagcaacaataataatttcatggttgggggtcaccacaacatgaggactgtattaaaagggttgcagcattaggaaggttgagaaccactgctataaactttaaacgacccgaattggaaaggccttaaataaaatgggtttcagaatcttgcacatattgagtttagcattggtaataaatttaggtaaaagggatagccagctccaactgtcacttttctacctagaaatgacttatttttcccattcataagagtggacattgaaattaaaacaacaacaacaacagcaccttgtgtgtgactgttccctttcagtagcaaaggggacaacatcagagcttcccttaaaggctgcagtgaagagtcaccctgctactgacatggttctcaagatacaatgtctatcccctgaaatgaaaacattccatgtaattcagatgtaaaaaggttactatgcagattaatataattacatggtttataatttgcatggttatcaaaccagggcagggccataagcttgtcccacttcacctggtgcccatgcacagagaatatatcacttccaatttaacagatgactttcttttagtttttagccaactttcctagagagactgttctgtccatcaagtccagaccgttaaaggaccatgtgtccttgctaagcagctcagcatcccttggtccctgggactctgatgaccagcatccccttgcccctggcactctggcgatcagcatcccctggcccctgacactctggtgaccagcatcccctggcccctgacactctggtgaccagcatcccctggcccctgacactctggtgatcagcatccccttgcccctggcactctggcgatcagcatcccctggcccctgacactctggtgaccagcatcccctggcccctgacactctggtgaccagcatcccctggcccctgacactctgatgaccagcatccccttgcccctggcactctggcgatcagcatcccctggcccctgacactctggtgaccagcatcccctggcccctgacactctggtgatcagcatcccttggcccctgacactctggtgaccagctttccccaggatgcagagaggacaggaaggagggccttctagcttttccagcactgattatttccatagtacccactgggcttttgttgtcgtgaaagtcagtaggaccgagtgtcaagaaatacaagctacccactctgagaacagcgtagcagcttctcagtgaggcattcactgaagctgcaggtgtctcatagccctgaatcccacaagtgcaccaaaaatgtgactccccaaccctgaattccagaacttctgcccaagcatttgctctaacttctgcacttctaataagcctatctccgtttcaggcagaggagtgatggaactcacaccggagcagagttaatctgaagcgcaatggaggagcaggagcaatttaatctctgcagcaatgctctgaacccagtgacacccgaaatggactcaatattaaatgacaatctcctctcaagagctttatgaatattaatggagccaacacggagcatcatttaaaaacaaaagcatgtcttcattttcaattgcaacatttctgaactcccaaaggcccattccctctcattttcacaagttatggtgtacatttcattgagatgggcccatctttgtaagtgaggttaggagatcacatgacccctgtgtgctcttgctcagctggccgcagggaaagccatgatttcaatctgtcacgttctaagtgaatacctaatgtgtgcactagtcagtgaacaattggaaagaggtgatggcatctcacagctatcagttcagctgttgtatgaaaatcagaagacagtttgggcaagactggagaagccagaatcatagagcattgctgatggagatgtagggtggggcagctgttgaggaagatagaacactgtttctgaaaagataaaaacacaatggccatgtgtcccagcagttcctcctctctaggtttctactcatgatcagtgaagcagagaccccaacattcctaacaaggaacacaccaacccctttgagcccagagtccagtaacacttgtagaaatacaatagttttaaggtagttagttgaaaagctgcagattgggtaaataaggaagaagaaaggtcatcttcctttggggctccttggatagcatgggccacagggctaagaaaaggaagtatccaaagatgccagttctaagcttggagccacagcaggaaatggctgtagaaacctctaaacaaccaaaatacgatagtgaagggagatgcatgttagtcagattcttaagctcatcaatcatttcagaggccacctgccccaaaacccctcctgcttgcaatgtgccctccctgctccagggcctccccgtgtgttctgaaacactgcagtatgcctctgccctagaccaactgggtgagaactgaggaatacacccagctagtgtggcaccatctgcctattcccattcccttaagtgtctgcccactaatgatccaaggggcatatctctatcagccctctgtggagcttcatacccagacagccaatggcctctcacacatcgccttcagctgctgtaatttctcccttaggagaatgctatcttctactcctatcacactgcttctctcataagacattgcttctgttggtatctgggtaagcagcctgacacccaccatttcccaggtagcactgtggcagcaactgagactccatcgttctccatcaagttccaggtcctctcattcatccagtcttcatttgttagtgagctccaccataccacctcacacccaaaatgtcttttcttcaccttggcttcagcatggctttcacctgttcccttccagttgtttagtctttgctaaaacattctccattctgaagacggtacattttctacaacatcacatgtctacctctttatgttccttttctattttaaaatgctttggtgacttttactgttctggagcaagacagcagttttctgttcagaacccaggaagtctaacctgtgctggaagactccccagaaaatcccctttttggccctcaagaaagcatcgtatctttggtcaaaaatgcaaagtaagggagatggactggaaagggggatgattgcattcttatactgcctaggctacatagttgctttgcccagctgtctctgggggagacaagggttcatgtttcaattatagaagaactagaagccactagaatgtcctgaaaaggccccatgcaccatgttgaatttctcagaaagtccatgatctcatgttaacagtagcagcagagcaaagcctcagtagcaactatagctttctctaagcctataacaaatcacttgtttctctaaatgtctaaatcttgggagaaagattctagccaagcactctagtttttaatggtgtaatccactatttgaaacaagagaactaattacttcttccacttaattgctataaaaatatgatcagaatgcatgcattctatcgtgggtatgccagcagaaggagcaacagcctgcccccaaagttcctggttgtctctgctagaactttcagcatgtcttataaaatgaactctgaccctcttgttttcagtcagcagtggaagaggacacacctgtataagtagcttagaactgtggtccgttgaggttcttgaaaggcaaatgtatggggttctctgggcagtgacacaatgaagtggctaggagcaagtcctgcccttccattgctgtgtgtgtactcatggtccacatctggctctcaggtgttacatggtggcattaacagtggctgcccagtgggattatcataaagacaaagaaaaccatgggagtcaaggcttaggacagtgtctggcatgtcttgggctatctccatcagctctgttaatgccaaccaaattattagaggtgtatttgggctggaatttcagacatgaactttgcagaagtgactagtagtcacagtctgatctgttagtaggaaaggatgctcaaaactgaatgatctagaagaggaataaacaaagattggccccttacctcaatgtaatgttcgcttagctactggcagatgtgtgttaattttgttactttccaagaccttttcattgaggtgttactttatacacaaaatcacatcacatatgtttttcatgtaaaaatgaaagccaaacagaactttccatgctatacaagtatgagaatgtgtattacatgtattgatttcaacattatagtatatgtatatcactggttctcaactggggaccattttattcccataccaaagatatttgtcaatatctggagccattgtgtgtgtgtgtgtgtgtgtgtgtgtgtgtgtgtgtgtgtgtgtgtgtgtgtgttttgtgctgtagacagaaaaagcaaaggctagggattctactaaatttcatacactgcatagtccatgcccaattgttaaatacatacagttctctaaaaggtttatgtgttgaaaacttgatccttggctggtagaactattaaggggattggatcacaagggcactaacttcatcaatgaataaacctattgatgtgttcatagatgaatggactcttaggaggcaaggcctctttggaggaaacaggtcattgggggtatgccttggaaaccatacattcccctgctgtgatctgtcttgcctcaggccctaagcaatgggcttggactgaaaccatgagattaaataaatctctcctcctttagttttctaaagctttctgtcacaaagataatcatggagaagaggctggtgttgggctggtgtggggcaggaccactgttcaatcccaacttctaggcatgatatggctgttatactcttgtgtttacggaatctgggatcatctaaataagagctccgcaggattgggcctctgaaataccctgtcttagaaaggggaggggctcatgcatccctagcctctaccaccggaggatttataatggttgatgaggagggagagagattttctcttgtgttgtagccactggtaaggtacctcaacccctataaagatctctaataaaacccattgagtcacacccccaacccaaaagacaggagagtaagtagaagagaactagcagggaacaggaaagggattaccaggagggtgtggggcggggggaggggtcaagagagggtaaggagggtgatatgatccaaatgtattaagaacatgtatgaaatgtcatagtgaaaccaactactaatcagtatatgctaataaaaacatttttaaaagtctacaaagaatgatccagtggcgaggctgagctactctgaaaagcctatgcacctatttctaatatgcatactaatgaggctgccggggcaaacactgtgaaaggaaaactttgtgcaaaggacgtaacagcaacagcaacatccaaatcactggaccacaggaataaggcccaggcttaaaactggagaggagggatgcccttgctttcttctgggatgactctgattcaaaggccccgcactccaggaaaaaacaaaacaaaataaaacaaaaaaccaagaagcttcctagagtctttccttcttcctagacagatgagagtagctgaatggagctccagaacggattaagtcaggcttccaggcatgcacttttcactatgcctcacacttcggacttttgtccctctgccaggtgggtcaggattgaggagaggattaagcatattctgagatagagtctgagaatattaattgggtatctgagaagcttgaagaggcacataacacactgtgagtccttctagagcagtagtgctcaaccttcctaatgctgtgtccctttagtacaattcctcatgtggtgacccaagcaaaaaatgactgcactgctacttaatgactgtaattttgctactgttatgaatcattatttaaatatctgatatgaaggatatttgatgtggggccctccaccccctgccacaagggtctcaactcacaggttgagaaccactgttctagaagatgagcatggttcacgtttgggactaaaagcctgcttactacatctttctaataaaaatatttattttcactaattttaaatatgcgtatatgtgcatgggtttgtgcatatgaatgcaggttcccaaagaggccagaagaggttgttggagccccttggagcaagagttacaggaggttgtgagctgcccagctgggtcctgggaactgatctctggtggtcgccatactccacatccatctttacagccctcagcacatcttagtaagagtcacttgctgggcctggggatgtagctcagtggtacagaatttacctagcatgtgcaagcttcagggtttgcttcaactgaccacacccatacaaacaacaacaataaaaaaataaaatgtccctcccaaacacaacttgcttagttcatttgtgcttaatataaatggtattgagtgttttctacatactagccaatgaggacacaaaggactgagacacaatcttggcttcccttggctggagatggaggcattcataacagaagaacaatatcaatatggcagtatcacctgatactcttagaatcttaccaaaaaactcagatatcataatctgggtagctgtggcaggcttcctggaaagcagaacgtcttccttggtttttgaaggatgcagaatgttggggggaatactgtgcaaaggcactgggtctaatctggcagggtccccaaggagatccaatagcagattctggagcagaacctgtcagcatgcacagccacgattctcaacgttgtaactagaaatacatgtggcagccagcacataaacacaggaggttttgtttgtctgtatgcatgaaatgcatgtctttgcatgagtacatgtgtgcatgtggatatgctttacatgtgtgagatcatgtgtgtgatggccacaggcagatgacaggagccttccactgttgctctctgccgtatcttttgagacaggttcagtctctcactgaacccagagctcaccaattgagccagagagctccaaggagccaacagtctctgccctccctaccagctacattataggtatatgtatgagtatgcctggcttttacataggtgccagagattctaactcagatcctcatgcttgcacaacatatgctttaccaaacttattctgtctccctaactcgtaaatgtggctgtaatagcataaagttaggagttctcatcactaaatatgactgtttttaagactatttattattttataatctattttttatcttgttttatttcaagatagggtctcactctgtaaccatggctggcctggagctccccatgtagaccaggctggtctcaaactcacagagatccacctgcctctgcctcctggactctgggattagaggcatgtgctgccacacctgcctattttatcttaaattctaagtgactctccaaaaagagtttgggggctttttcctaatagagatttgtagaggacagtaagccacacctgtagccagcctctaacaggcgtggcttactgtcccctaaaattccccttttagtctaaaagaggattaaaatttaacagtgtaaagtatccaaaattaacaatcataaaggtgaaatacaagaagatacaataatctgttatgacatatcctaaccatgtctacagagatttataaacagaatatgacagaatggttccttgaaaggagacaaagtcccaggatgccccattctagccttatctgctgctggtctaaggagccaggcaacgcagtaaggaagtgcccatcatcttctctgtatcactctcccccacgtgacaagttctaacaacacagccacaggccagcttcctactcctccacagcactgcaggagccacacacgaatgtgagcagactctgatcacacttcactccagagccaccatccctgaagtctatgaggacactctgggttgtccccatgatttgtttgggaatgtgctcaaagaaaagcaatattgtgttagtaaatcagcaagagcaacttaagcccaacaaaacaagtcccttctggttgccattatcattacactgacagagtaatcctccttgcagattggggtggaggggaattccaggaggcctgtctcacagggcacagaactctctttctccagggatctccactgttctggggttgtgaggagtctggtttcactggattttaagaagctatcgagttaggagagcactgtgcagacttcagacttctctcgccctctgtccaatatttatttctttgtaaccctaaagccaggtgggatgtgaagcagaagcatacttttgttatcaactggtaactttggaaattttaagatagtaaatatgctaattatcaataaatgaatgccagggttgataaatcattttgtcgataattccacgattattatttctaattatgaagtccacacaattcattgaaataattacttctctataatatggaatactataaagatgctatcttttctgagaatatttaattacatgcataataaaattcctcactagaatgttaaatgatacatataaaatataaaactatgtaattatgaccataatttttaagtgaacacacacagagaaagagagggagaggaaaagaaggggagagagggagaggcagagagagagagaaagagagagagagagagagaggagatagaagtactaatggtagtttttggatggtagaattatcttagtattttttcagctcctgtaatgaacatttatcactgtgtaagcgaaacacagtttctccatgtctgtagtgttagcaactatcattttcacaggcatataagattccaaaaattattactcttttgagaggaaaatcagatcacatcaatgtttttactattctaggttgggtattctttgtctaacatgcctaggattggtgcctcaagttttcagattatggaatgcttgcaaggacttgagtgaccgagcctccatagaatccaaaatgtctaaatcctgaggctttctgagcagtgggtctgcattcagaaggttatggcttttggggtgtttcggatttcagattaggaatgctcatttctgcctatgatactaaaattttaggctgctaatgatccagctgcgctaagcacattgcagagattcaggcacaggcatctttctccctggcatcctgcttcacaggcccttcaaagctcagtgatgagatggagcaacatgaggtgatgtacagagttcctgcatgctcagggcacccagagtaatgtagtctcactcctcctccacccttccccggccacctgacactcacctccagccaaggaactagccgcagtggactgaatattccaccgctctctgctccctgcagcttctactgcctcatgtgtgtggttctctctctaatacatcccatacatacataaacataaacaatgtatacacacacacacacacacacacacacacacacacactcatacacacacacacacacactcacacacacacacacacacacacacacacacacactcatacacacacacacacactcatacatactctttcaggcccaatctgcatccatttattgctgcattgttccagatgaatccactgagcagcaagggttaatagcctccctgagagacagagagcatggactttggtgaggcacacacataacactgacaggttgggaaggctcaaggctggtcaatttcctcagcttccaccgctgcagaggaacagtggcttctgcctttcaatattttcatcttgccacattcctgtgtggtttcccttcctccctgaactgttcctttgtcttccttctacctttgtcttattaggttaatgaaattggtaacatttgaacgtttttctcctacaaagatagttatagctatgggtgtgtgctcatgcacatttatacatctccaaatatatgtttttccaataaagcaaatatcttgaaaatgatagctattcaaatgtgagtcagtctttggcctgggtaaacataacctgcatttatacctagctgatgtgcggcacggggttcttgattttcaaaaagctgccagaattaaatggatggaactagaagaaaccatcctgagtgaggtaatccagtcacaaaaagacaaacatggtatgtactcactcatacatggattttagacatagtgcaaaggattaccagcctacaatccacaccaccagagaagctaggaaacaaagaggaccctaagagagacatacatggtcccccagagaaggggaaagggaccagatctcctgagctaattgggagcatggagggaagggagatggaataggagaaagagaaggagagaaaaggaggagagaggaggacatgaaggagcagcagatctagtcaggggaagaatagaggagagcaagaaaagagatatcacaatagagggagccattataggtttaaagagaaatatggcactagggaaatgtccagagatctacaaggttgaccccaactaacaatctaagcagtagtggagaggctaccttaaatgcctttccccaatgatgagattgatgactaccttatatgccatcctagagccttcatccagcagttgatggaagcagaagcagatacccacagctaaacactgaggtgaactctgaaatccagttgcagatagggaggagtgatgcacaaagtggtcaagaccagactggacaaacccatagaaacagatgacctgaacaaggggttgctcatggacctcagacagatagctgggaaaccagcataggcccaactcagaccccctgaacctgggtggaagttaggaggcctggggaatctatggggcctctggtagtggatcagtatttatccctagtatacaaatggactttgggagccctctcctcctagagggatactctcagcctagacacacaggggagggcctaggccctgatccaaatgatgtgacagactttgaagatcccccatggaaggcctcaccctccctggggagcaaaaaagggatgggatgggggtcagtgtggggcaggggaggaggggagggaaagggaactgggattgacatataaaacaagcttgtttctaatttaaataaaagtcaccaaaaatgtgccagaatcatcatgagcttgctaaactttacaaagtatcagcacagaagctcaatcttgtattcctgcatcatagccatggcctctccaaatacaacctccaccccctgccttccatcttaagggcaaacatttgcttctctatacactgagttgaaaatggaggtcagtagattaataagttaatatttttaaagcccatgtttatggagataactcacaacaaaaaaaataaaggtgtcagtctcttattgaactcttgggaatgagtccttgtgaggtttctggtgaataagatatgaaacagagtaaagggtcacttggttcttggaggttggtatgcttgtttattattattttaggaaacaggaaatatattggtaagaaacttatatttttatatgcgtaaaaaagagacccagagtgacaaaacttgaaataattatgagtaattgtaaagatatagggaggggacaaaggtagggttggagagccccagaggggctgaccctacatcatgtgtagccttcgtgattttttttttattttctaatgaggacccactgtggcacacctgatgcagaaggaacaatgaaactgagggaggatgctttggaaagagcatgagccagtcaggaccaccaggagaaggcagttagggagttgagacagcttgggagtgaagaaacagcatgaggaaatgttattcaattaaatagcaataataaattaatgatgatagctattatcattatgagacagggtctcactatacattacaggatcgcctgtaacttccaattctgctcagcattttgagtgacagggttgcaagagtgtgctattatatctggattatccacatgaaattttgtaaagcataacattattataaacatagtatcacataacataaattgaatatgggcattaaaattaataaaatctagtaactaagctaggtggtgatggcacacatctttaatcccagaacttgggaggcagaggcaggcagatctctgtgagttagaggccagcctggtctacaaagctacacagagaaaccctttctcaaaaaatcaaaaaaaattaatacaatctagtaactaatgttcattctttagttacctaaaatcatccaactctctttgcttgacttttcaaccaaggtcaagtataaagtcatctggctaacattccagggactgtttaacttaagtcctttatattttatatgattcataacaggtccagagaggtaaagtgagctgtctacggttacacagttggaattcacaactggaactcttcctgtaggcaagtaccaggacccacactggccttgatgtagaaactcttttgtctccggggactctggtcacactctattctgcacctcttagtcaatctaacattgagcgcttgagctttgctgtgctgaaggtaactgctaaaggagtctgagggcgaattagcaaacatcgatcgcagtttctccctctagactctcgggtgagaaattaaatcaagcaaaatgagaacatcctagtagctgtggcaggagagcctggccagttgttccaccatggcaggagaaacggatacccagggcccctttgtgctcactaggctacactggaacacaaaatctaaccatggaagtagtctgtgtcttgcagaccctaccactgccagcaagacacaagtgccactccatggcttcctttgtgaaggaacaaagccacagtagaacaaagccactcatctcacagcagccaggaaacatgcaccccagtatgtagagcctacagcatttaaggtcaagattttaatcatcttttgaggctcaactcatatgattggagggatgggagtgatttcaccttcatggacctctcttctaaattccactcagaactctgggtagaagtggctttgatatcacaatctggttgaaacaagaacattgtgtatgtgctttaaataccaagctgcagtttctaaaatgctatttttcatattttatggcaactaagaaatccatcatctttcactgttgggttattatacagaaggctgggaagatgtgaaaggttgtgtgtgggggggcaggaagacccccagtttggacaccactggtgtcatctctgctctttcccttgtagagaccatccacttagtatgcacagtctgtgtgctataagagatttgcattggagacaaatcattttatcaaaactgcaaactttaagtacatggctccgtgaggacatgggcattgtctctgtgaacaccattgcaccgagcaccatgtcagtgcattcaaagcactagatgcttgttacacagacggatgggtggatgctggatgcatgggtgtgaataagaataatttggtcaaacatagctttatagaaaaccattctctaggcagacaaaagtggattaggacatggagttccagcaataattgagttctgtttcctcgaaggtcagtgacagtgaaaggcgacaaaaaggacaccatttgttaggcagctgccagtttctgtggaaaaactacccgagatgacctcctgaaacggggcaaggttgatttaggttaatggtctcagaagtggcagtctacagtcacttggcctgggtcttttggacccacacaagggagaatatcctgttggaggtgatacacaatagaacaaagccactcatctcacagtagccaggaaacaaagatctcagtatcctcttcaagggcatgctcctggtgaattaacgatttcaccacctgccaatagtgccataggcgggtgactaagctgttagtacacagcatctgagggtattttagactcaaatcataatatcatattctcctagttagcgatttcctgtccataatcttgtgattcatacccacttcgactacagaaggaacgtttatatttttctgctcaattttttcaactttaattccctagttaaagtatagacaggggtatattttatatccatttatgtaataaaagcattttcatgctcacagtaacccaagcctggggttagacctactttactgctaagtcctttgaggtttcaaaaaaaaaaaatggagtaacttggccaggatcaaatggatcaaggggaaggttagggtatggtttttaaaccagtgttcttaagcaccttgccagtgctattatggtgttcacaaagaggtagatgtcagttatgctttctgtctgacttccagtatatatgttataactgaaagcaaggggggaaactgtgtgtgtgtgtgtgtgtgtgtgtgtgtgtgtgtgtgtgtgtgtgtgtgtgtgtgtgtgtgtgtttaggagagaaaaagaaaaaccaatttgggaatagatctaattagatgcttgcacattttatcccagttctcaaaagccaattaactgcaggaatagtttttatagctgtgaacacacctagctgtatcaggcagccactaccccacagctgttattatctgtagtcattatggatttttgttttacttcttaaaaatatacctatatctgcccactgtgaccattctcaaaacacaaatgcaaacctaacagcagcctttccagggtggaagagacagtcatgcgaggagcccgcagctggccttccatctatgaggaactcatttttaaatgcctggacagcatgtggctgttcttttgcttgtcaacctccattgattgattgattgctgctgccaagagcctttgtggcagaatcccagcccgaatctaggtttcatgggtgggtgctgtggtaaattgagatgtccactcagggcccacagtatggacatctttagtgacataacaccaagtgcatagtcacataccaattcccctcttcaaatgaaggcttagaaacctttacaccgatcagagaaacccagactgaactcgagatggagaacagatattgagaagggaagtggacttagccagaagggtgtttagacagtgcaccagtggtctaaagcctatcctcttgaccagaactaataaattctgttggtgggctctgtgtgtggtgcagtagtagctcatgtgtttagcatatgtgaggccctgattttaatcctcagcaccacaaaagaaaaacaaaaacaaattaatcctattggtagttatcagtagtccattattctagcaaagccccaaattcctccccacagtggtctgacaccatctgattggacaggactctgagtgaggtttgactagggtacagttaatttttttctgtaggaaacttgctgacaggcctcctttgggaaactaaaagcgtgaaatgcttttcactccagtgaatggtgttccacatgtcacaaggctccagcctacagaagcctgcaggctatagaaagtcccttcacacactccactaaataagctccaagtgtccctctgtgtcaccttggcagttcacgggacctttcttacgcagttaaataagaggaagatctattgagagctcagtagttatccccacagcaagtagctggattattttgcagattcctggtggatattctgacctggatcggcctttgccatgcctctatgagactctgacatcttatataatttataacactgcatttccttagcagcaggtgacagagatcaaagatggcccccgattagtgacaatacccccacaccctgaagatggcatcatctctctcacccttttccagttttgttattttctagtgtgtctgacctaaatcaaatccaggcagcacagcacaccacttaaatggcaagagtgtcaaaatgcgcctcccttaaccctgccctgccatttcttcaccttagattacatgtttgcccgaccactgctattatttctgttgcaagtgaaaataagatcagtcactgaggctccctgagaaaacatccctgacatttaccttagcacatccagaaagctcagcgcaccacatgtctctgagggtggggtggggggaggcaaccaagtcctgtctccttcaataaagcttcatggtgtaaaaggacaaatgattttattaaggaggcacaagtctaaggcgtgctatgttgggctgactactggaaactgccatacttcaaggacagtcatatttccccctttgaaatttgatttcaatacatgagggcagagccataaccagcccataagagtagtcatacaaagtaggtaccagtaattatcaaatgtacggaggaaaacctctgcaggaagcatattccttcaatgacaatgccttgatggggaaataggcaccgagaggagatctgaattcgcacccttctcacacagagaagagcagatctgaattcagtttctccctgcatttcttctttctaatgagtgactactaaatctccccagttactgggccttagtttcctcgggggtgatttggggataacgaccagggcctggcttctcagaatctgcctgaagatagtgggaagaatgaagacctgtctctgtgttacagtccagtatagtgcagttgttgacagagtcctggattgtggagggtcaacacattagtggtcttggtaggaccaggtgaaccataccgttgcttggtgactcctacaaaagtaggaggtcctctctttagtgactctacagctaagatgtgaagagaaggctatttttctaacaaatggacaaacaaattctaagagtccatgggcagctaactggtacctaacatactgaggggagccatgatctgttcacagacttaaaagctcagacacagtgagacaagaccacagtggcaactctttcagagctcagttccttctttaggcagtaagaggtctacacaggaaacaactgtaacacatccccagtttctactgcagctcagacacccgtggctctccacccctgagaccggataatgagatggaaatgtaagagcctaggaaactaacccctggacttcagtcaaagggatgtgctgtgcacagcttgtgtctcttgatcctctcatctcggctcaggttgcttccactcccacctctcctccctcttccagtcaagcatctttcttcaatggagagagagagagagagagagagagagagagagagagagagagagagagagagagagagagaccactgcattgtcctgccctctcttttggaactctgttctgccattctggcctcatccacattagactcagttcaccagttctatccactactgatggttcctttctttttctgaggacttagcctttcccctaatcgcctagtttcctactttctcctgcttcctcagccaggaaggtgagacccatgcaagctggacttggtcatgctactttagaacaaattctggataggctcacagtatgtatttgtcgagtgaatgaataaatgaatgaggccaatgaatgaagaaagagacaaccaacctatacaaaagccttgggtgttaatggctatgacaacgaggatttattttaaatctgtaactgcactgtaaaattaccctgcatcaatcagatggtgttcttaagaattctatcttaggctcctatatctcaagtaattatactaaaatggtgttattagagctagctcaagaaaatcatgcagcaaatgaatgggatttaaaaagaaaaaaacatcttaaaagagatttctaattacatagtttaaaaaattaccagagtttctgtctgacgctgccttgcatttcatgaaaagccctagagagctgcacatttcatggcccacctcctctcactcagccagcgatcttgaggttattgtgtgtggtcctgcacaatcactaagagcttgggctccattgctcacattagccagctgaggtccctaggcaagttcctggcctccctaggcccctatcggtgcatctcctgaatgtggacaacagtacctagctggaagggattggcaaacattcaaatgcatcattcagcatctttccactacacacaggtcagctgaaggacagctgcagtttgcaatctatcaccctgctggggtgcttgcaaaataaacgtcatctgatgctcttggctttggtttgtctttccaaacttctccccctgtaaggaaatgctgattaacccaaaataaaagtccagtacattcatccatatttatatatacccacacttgtgcatacacatgtacataggcatttacattgtgcttatcttctctacaggacttggagtccttgaaggaggtgataggtgaaaagggccaacaattgctgagtatgtatcagatcctcttctagtagttttacatttaatgctcacaagaagaccgcgtggtggtaaaggtatcatacttgtcttctactcatccagtcattgaagagttacatggtatttatttgctgtacctttaaaagattatatggcagtttaagaaggagagtgcagggggcacatttatggagaatgtttatacgaactggagcgatgatggcttatgcattatggatgagaaaagccctgctttatttctacactgtcttcacggtttcctcagtatctatctggtgatgaagtatgaaacttgcttagtaccagtgagaacaagtggtttcccatgagtactatgggaagccgagtgagaggcgctctctcattcaggtctgtttggatctctgtaaacttggtttggttctcagtctttctaatgtacaaaaaatgtactttgacgatgctagtgcacaacggaactgatctttgtggtatttgattttcaacagagaaaatataagaaaatcagtaatccgttttgtcccttttgttttctttttcatctcagagtttctactagtgtattcgatgacagacagcaaaagacacgttgtggagtgtcagtggttctgtccctttgccactatgcacttttataacaggtgttaacattttatgcagaatgctctattcccagtgccaaaggtttaagtcagagattgggatttctgctctttttaaaaatggccttagcaagggatccatgttgtcacagaaatgaaaaggaacaagcagaaaatacctggaacaattgttgaagaatgttgacctgttttctggttttgtatagtatctagcactatacattttaacacgatggacacaatgcattgtgtagccacagctttacaaaaactcagtcttgtagctcttttttcagatcttccttttttttctttaagaaagaaaagaaaaaggttccttcctccctaacccctgagcagtataaccctaagttagcgggctttgccttcagtgtgtctgcaaatcattttctccaaaggcaaaaatgagaataagaacagtggcaatcataacaaaaacaattattacaaagagagagtatatgtatatactctctctgtatatatattgtatatatattatatatatggtatatatatattatatatgtatgtatataggattaaaatactgccagctattcttgttagtttcagttaatttactacatccattttaaagggggaaggaataccctttctattaggtaaaatcaattctattcattgcaaatacaagcaaacaaaggtcatttttcatttcctgcctgaaaagcaaaaggctgaagttggactcgatatgaaaatctgaatcactcaaagaacagcaaggaaggtgaaggtgtaactacttggtgcccagtaggaattaagcatcacgtacctacaacatccagaggagactttaaataacttaccataaacacatgagttacagaacatggagagaatgtatggaaagagtggagctggtgatgtccatcaggatcaccgctcacttgcttattcatttatttacgttggttcactccatacctacactgaaatcaactgcgtatgacttacactcttctgggttctggggacacagcagtgataaaacaaagtccttgttcctggggagctggcaatcttgcctgacggaggtagcaagcaaatgattgcatatataatacgttaggcatatataatataatatctaactactaaattatcttataagactaaaattagagcagaaagacttcaagttactgcactgtaataatctgtcaggccagttagcttagtgactccacactcccagcaagattgtctctatgaaggcagaagagacaacagcacaaaagaagggtgttcactagattcccatggttagcctttctggagaatggagcatttcagagactggtccagtcctaggcctgggacacagtctctgcacctttcccctggccatggtgagcccattcagcaaggccaggtcctcccccacttggtcatgacgtgtgctagagggacaggacattcggagctttggtctctgctatggtttgaaagtgaaatatttcccacagacttgaatgttgaatacctggttctcagctggtggtactattttgacagattgtggaaacttgaggtggggccaagtcagaaagtaggtcacccccccacacacacacaccaaccccttctacattcacttctctctgcttcctgtccactctgaggtgtgaaggggctcccatggcacacaattccaccaccttgaggttctgacttcccaaggggcctagcaacacagagctaagtaggtacattctgaccactctgaaactgagccaaaatagctccttctcagtttacattaagttacgtcttttaggcattttgtcacagcgacaagaaaaatagagtctaacatccagacagcagtatccacacctcttccaccttttctgacctgtactcaccgctatgaaaatgacttccatctctttctcaggcttgggtgtctaccaatatcttacttctggtggtaagatccttgtttattgtctactggagcttgctctctgtttatttatttatcccattcataggcccaaatctgtctctcctacagccatggagtgatatttaagacagagctagcaaataagaaatcctagtcattggtcagcagcattgtaactaatattaatctctgtgtgttatttgggggccctaatgtagtgggggaactcgggcggctggtggaaagagttatcgttacaatggagtgtgtcattctacctgttggcacactttattggcatcttcaaagtgggcttgtttctgggctaatcactgatgtatatgcctgccttgttacttcagggtagaacgctaccatggtaaccagttgcatggtccaagactttgctctgatgcacggacttcctgagacctcaccatagcagctcaacagattctctgctgggtaatggttaggaccatcacatgcagtgccctgcacacagtgtgaccctggaaacagcagatcagcatatttctggaactctaccactgtagtcattaccaacaagcatcaaccatgggagtgacaatttgagtcctcctagccttctgacacagaattggctataactgtaccccattttccaaatgctaactctatttgatgacttttatctttctccttgtgtttgccagctttccattattgtaacaaatacccaagacagccaccttataaaaagaaaaagttccctctggctcctgtattttggagtttcaaatatttggagtttcaaatatccaaaatactcctgtattttggagtttctgtgtttgctttcagactttggtgagagagtatatcataagggagagaatgtgagaaacaacactgctcaccttgtagccaggcagtgagacgggaagagacaatggcccaaaacacctccttccagggcaggctcctgtgacttaaaacctcctttacgccctcgcctcttaaaatgtttcaatgccccccccacaaaaaaatcacgctgaagacacagcctttaacacaagggcctttgagggacatttgataatcccagcccttctccctgactgtaaacgctacagaggtagggactgggtttggtttgatcaaattgtgtctactaaacttcatacaggcctgatcatcacaggcatcgactcaaatttgttttcactgcttaagtgacttctgactgatggacacaagggtcttcccagattcaggacattcctaaactgaaatcatggtaagctggctcctatgtggaccatcttaatcttctcagagtattcatcgtcttctcctctgtggtcacaacctggtgctttttgcaggaccacccttcctttgtgaggtttcctatggtgacagattctttagcatgactcttatatttctgcaccagagggacagttgctatctttcttacttctcaataaagctcccctatcattgtaccatattcccctaaatccccctcaagctgttttaggcatccagtacctccaactcatttgacttcataccttgggttctggatacttcctggctgtcatcattctggatcccaagttcttgaatttatctcctccaaggatcttggccttccattattttagttactgtgtatcaccataaaacatcactgacttttctatgagtttagcagaggtaggtgaggtcatttaatggatgtctcagctacccattacatctagcaacttatacaatacctgttattttatagaatgaagccagataggtttctccctgattaaagaaaattcaggctaaagtaaaataaagcaagaatttccatgcactttctaatatagttgtaactgtacaatatgcttctggcagaggctagtgcttctaggagtcatttaagaagaaaatgtggtcctgagatgaattattttgaagagtgtttgtagtagtctatagttggataataaatcatagaagctgtaactttattttcaaacactgtcatccattcttcctatttccatggaagtccttgcatggtcagcttctacctcactgttgatccaatatggctcccatagctcccatcccatccctcaagttcaaagatggagaacataacattggtctaaagtaatcaacaggccacaaagctctttgtagtagtaagtggctgtgtgatagaacaagaacccaattactaagtcagtaaacttttactgtagcattgaatgtgggcataaaagggaaacctgagatggagagggaaaactggggagtctggagtcactaagcatctagatgaagtcacacacttagattctctgtggtgtggaagtcagtgacatgttcatcatactctttttctcttcctgagcaaaactattccctggccttctttacaggtgggtggtacctatgagaatgaactctagctaagagattatgcagaagaaggtaagccatttccaggccttcccctaaacatagtctttgaggtcttccattttcctgacccaataaagtacccctgaaaatgttccaaaatgaataaaaggaatggaagaaattggattagaggtgagggagacactgccaaggaaatcccctttataaaaatgtcattggaatagagacctgatttgcaaaattgaaaaggcaacagagctgagaaagaatgtttccaatagataaaaattgaatgcagagatcatcaggcaagaaagagcttgacaccctgggagaattagatgagagttagcataattggagctttgtaatagcaggagaatgaaaggtccagtggtctaggtaaggcacgatgacttgaccacattcttaggagaggagacagaaaagaaggtgattttacaatatgattttggaaatagcacagacaaaacttgttggttggctggaagttagggacttggtaaaaggaagcaatcagcaatgtctcctaagctgttgacttgagtgttttagagaagctgatatgacatgacactaaaacacccccgccctccatcagctcatgatgtgaatgctttgtccccagagcttgctgctatttggacagctatggagcctttgaaggttggtgcagctggtgggccactaaacgttctaatcacttctgtttctggcttgcattctctgcttcctggtccactaagatttgaagaatctctaccacacgcttcttcttctgccgtgaactctgccctgcctttctgctcatgatggattaaaactccccaatgttaagagaaggattctcttattctatttctgccaagtattcagtcacggtgatgaaaagtaacatgtagatattaattccatttaatcagatggtaagataagactagacccatcttggggaaggaaacaatcagaacttccaatttgggacatggtaagtttgatctgatgactaagggaccacatagatgccaacatagacatcaatgtttatatgtcagaatttactagctctagatcatgatgaggatgatcatggtggtggtgatgatggtggcagctaatattcactgagcatgtgtgaaatacctgccattgttgaggtgccttgaacagactgtctcattagctctcataatgtgcctatcaactaataccctggtttacacacagtgaaaccttgtcaatggtaagagttctactttctatgacatgagaccctatcgcatgcaaggtgcttgggggaagaaccatgtcctttctctctctgcatctccaaagctctggacagaataccttgtacttaggtactcagtcatcactgtctgattccacgatccttggaggagcacgaggatcctgaagtcagacttccatactgatctcttttctctgccctctcatctccttattcatcagccccttctagtaagggacttccaacccaatacctcgcttccccttccacatgaagtcggagaactaaacagagggatacactcagtttgtcattggaggtacgaagcatgaagttgtgaggttgcggggggggggggatgggggtggtgtcctggtccacagttttcattcagtgcctcatctgctctatggctttctgctgaacctttaaggttactgggatagtggttagtaaagttagaattcattctgtgcactacgcccccatcccccaacttgtatagtttctaaaaattgctgcaatcatgagcaggaactgactgaatcagattggagcaattcaaactagaactggcttttctatttctctctggccaagcgttttaggtcaatctttcacttgacgagatagaaatagagaagggataattcaatacatgctcacagcaccttcccctgcaatctgaagagaaatgagacactgaagggaaggcaaagatctgcctgtttttcactaggggattgctagaagtgtagtggaagctactgcttctcacaagaggcccacagggctgctgtggagggtgcagcccagtgagaggcctctgctgctcatccccatactgctttcctcctctttcttccctagactcatccttctggtcaattcagcctcccttcttactcctaagaaggcccaagtgtgcttatagtggattcctctccctgataggaatccccgtcttaatgattttaaatgataaaatatgctacctgtgaatccccttctctcattcccagaatatggattcttcatggagagaggtcacacacacatatcctatcttagatagctgaaggtttagtccagttcctggcagattcagtgtggttaaaaataaaccattgttgaaccacctggtgagcagtcaggaaaacagtatgctgttgacaagaagcctcggttttagttcaggcttttggggagctccgcaaacacttcaaaacaagccctttaccctctatagatctactgcttcatcagttaaaatcagggatggactagcccagttgtgaagctctcagttttagcatcagacagtgtttgggtgtagatgagtgatcagcaggggagaatgcatttacgaaggccagttccacaagccccttgtcaccaatcacagttctccaattagacactctggattttcgggcagagaatatttctctaagttctaataactgtgttttcccatccaactgcaaacacagtactttcccaacttttcgcctggcttaactaggataggactagggcagggccatgacaaagtatccaacgacagaggttgtctgctccctggcacatatggcagacagcttaacagtccagagaatattgtgtacattttaatctctgcctgcttccagattcaacattaagatcaaagtcctaagagaaagccgatggcttttagtgtgacatttctgttggtgaagattccaatggactctagggaatatcctctaccatgtggccatgattctaagagggccctgatctctttgtcccaaactgggagaggggccagcagaaaaaaagcaatgacactttctctggaagaagagagggtgggtgtgctgtcccttgggctccatttcctacctgctatcaggatagagctttggattgtcctggccttgtatgtccttctcccaacatgcacctttcccctccttcctctccagttctctatctttgcttctcttttagatttatttattttagatgtatgagtgtctatctatgcaccatatgcatacagtggctgcagaggatggaaaggggcatttgatcccctagaactggagctacagaaggttgggggccactctgtggatgctgtaagccaaagccaggtcctctgaaagaatagccattgctcttagccatctctccagccccaactctctacctttcttatacccagtctttccctgttgattaccaaatcaactaatgggatagcattgcatgtttctaaaaaacagggaaccagtattcttttatgtttcagcgagaaagatgtccaattttttttttcttgaaagccatagagtacacctgccactctgccactcctcttgaatgccaccagcaactcatgcctgctgtcaacaagccacatcatcagtatgtattcacaatttccaaatgacttgggagtggtacttttaaaaaaaatcacaacttacagtcttatcttactttttcacgactgacatttaagtttacataatgctttctggtgggttatagtgtcttacttgtaaaagtaactttagtggacactctcatcactcttaataattagaaagcaatttacctaaactgtcccatttaaaggttgaacagaaaccctcgttctctccccatcttatggtcacaagattttaaggtgtcttttcttttatgaatcacaaactcattgtttctatgcctaagacagtgattcccaaggttttcttcacaatatgtaaaaaaaaaaagaaattccccctacctcttccctgtgggtatgttcatgtctgtgaatctgggtgtgtccatgccatgatgcttgtgtggaagttactgtccaccttgtttgaggcaggtattcttgttcatcactatataaacctggatggaggacctgtgatgacctgagaatactctctctcccttccacctcatactaggactgctgacattatagaggtatgccatcatgcccagttttacatggactcgaactcaggtcctcatgtttgggttgcaaatgctttacccatgccgcggtctccccaccttcacattactaacaataaaattgttctgagcctgaaaactgaaaaactatatgtatgtacaatacatgtatacatgtatacatgtatgtgtacatatatgcacatacacaaacaaatatgcacatatatatgattttgatctgtagtaggaactgaggtttttctgtgtaaagaggactgttatgtcatcttttcaaattaaatgaagtaaaagatgaaggcctctactaccaagatgccaggtaagaaaactagtcagtcactcgactactttagagtaattaccactgtgagaagggcctagcttttggctttccagtgtccattccttacaatatcataatgttttccaaagatagtgcttttaaaatacaagaacatgagcctgaatttatgcaacatttgccctttgaaagtcaaacaaaaactatttctttctccatatcagaatatttgaagagtgacagaaatataccagcgctcgcctgggtctatttacttataatctctgggaagcatgagatttttgcttcaagaattggtttttaaatcagcaactacactatcatgcagatatgatatttattaagcagctctgatagagaagatgcagtatgcaattaattccccatcctcaccaggaaatacggaaggaattagaaacatacgcattaccaacagctatcaataacgggtaaagaaggcaaaggagtgggggagcttgcagagctgaggctgggggagcagagcatggctgtactgtgaggctgggaaatgacaggaggttaaagttgcctgctctcagctgcaagcaaagcgttatttttatgcaccagtttggaaaacaatggagcagaagacaaaggtctggccatttgctgaatggaaatttcaaatgcgataaattctttcacacatctactgacgctaatgaaacccaaagtagataagagagctagggtttttttttttttttttaaattaagtcaaataaaccaaattgtttttctgagtggagagcttttttttttttttaatcagctgttttcatccccaaaggacacactgcttatgagctttattcaggaaagcactctctaatgacttctcttgaatgactttcatgaccttggtcacctggcttttacttaactgttcccaagttgggcttactacagctgtatgttgacaatgtggttgggtctgctggctttagactccatgggtgttctttatttgtgctgaggaatttttttagctctttcttccctttggcttaccacgtccttgagttaaccataggctgagtcttctttctgctggttctatctatttcttacttggatgtggcaatagcctatgccacatcatggctgcagcatggaaaaggccaatctgccaaaatgtaaatgtgccaaaacttacctgggggttgggaagcagggccatagtaacaattatgattcagccaatttggataaacactaagtctgtatttctgctgggatgggtagggtcagaggttgagacaagacatccatccagactagtttcctttcatctacatatacctttctttctttctttctttctttctttctttctttctttctttctttctttctttctttcttccttccttccttccttcctttctttgttctgtctgtgagctatagtgaggagaaggaagtctgggataggtagggtcagaggttgagacaagacatccatccagactagtttcctttcatctacatatatcttgggttctgctgacactggcttttgaaaccaacaatgaggaactcctcattttttcaggcatccatatccctccatccaatttgtctctttacaatgagatttctctgcaagtaaccaaggcactaaacttacagtgaatgaacatttatctgtcttttacataaaaatccagattgagcctagtgcaatagccccagctatgtggaactaaataactaagctttttcctccatgttctcctaaatgcatttttctttttctcatggtctgacctggaactcgatctcacccagggtataagcatcacaaagcagtttgcacacacatttagagaagacacctagaaagctgcatttggtttgtgattcattgacataactgcaaggcagaatgggggattcttccctatcccggtacacacctccagctagatacagatgctcttgacttgccatgggctcctcatgaagtggagcccagtccactgaggcacgtctgagttcactttcacagctacagggttggctagaagaagtggttcattgatgctgcccagcaccgtgagaatgttgtctcagtccaggaaaatatcagaattcatacttcaaagtacagtccctgatggatgtgtgctgtttttacaccaagaaaaagctgaaaaactgtaagccctggaaatgcatactgggaaatattgaccctctgatctgagaattctacatacgcagaattagaggaggctgaagacatagctcattcaattaagtgcttgccctctaaatataaggatctgagttctattcccacaacctgtgtaacaaaaagctgggtgtggtggtgtgcatttataatcctaggctggggaaggtggaggcaggaagatccctagggtttactgccaagccagtgtagcctattcagaaatgagacccatcatctgtcccctaatggatagcactggaataagagcaggcaggatggacctttggcctgcatggacatgcatacacacatccatgcatacctgcatacacacaaatatgtcctcgccacaaaacagacatagagaagagacactgaaagacacaacctgtcttttgctacaggctatatcctcagtctaattggttgggatatctggtgttcttgtcagatttccgttgagctagcagattaggagggggcctgaagacaccttgagaagtgacaagtgaaacagcaggtgataagagttattcacaggcctggcgttggtggtgcatgcctttaatcccagcactcgggaggcagaggcaggcagatctctgtgagttcgaggccagcctggtgtccagagcgagtgccaggatagactccaaagctacacagagaaaccctgtctcaaaaaacaaacaaacaaacaaaatgtaaaaagacttattcacagaagccctgagccacatagtgggggacagaacagatctgtatttgcagggcagcacagcccttggctatggagcagggtttgttaatgttttcattctgtgtggcatgggaggataggcacatgaaaggctcctctcaatccaggcaggcattttagaagacatgaaaagtcagagctgcctcatgtggaactgtgtttgctgacgcctatctcatgagtgtaggcaaggagggccgtagcccttactacagctcttctgggcctctggtggaagttttggggggtgcagagggtagtgagaagcaatagaatttcctccaggtccctgactcttgagtggcctgcacctagtatatgataaatatgtacctgccaatgaacaaatggaaagatgaggttggggactgtgctctctctaggggcatcaacaacttgggtttctgtgtgaattgggaatgaagttcatctgtccggagagaagaaagtgtctctgtgctcaggggccatcttacaatcactcacagtgcccagttgcccgtctgagtcttccacaatctccttttagttcaagatgctgtttctaatcaactgaccaaaccatcaaattgtttgttagctcccatccccaaccttccaacccgctcaccagagctctttaaaaacagatctattttttttattattatttgacttacgtacatgtgtctgtttgtggctgtgtgtttgttcacgcaggtggtcatggagaccagagacatcagattccctggagttacaggcagttgtgagctgctcgatatgggtgctgggaagcaaattcaggtcctccacaatagtagcacacgctcaaaaccactaagccatttctccagctccatcattagagctcttaaaccagctggcagagccgggtatttgtcatctcccatggtcaaactttcccaacgtgccctgctgattttcactcagagactcggggggtggggtgggggggctagaattctgcttttccatatctttcaggaaattactatgctccccattcttgggggtctggtaccacaaaaatcttaggaaacagcagtcaaagaagggggtaagagagtgagagggctgatgcaggttgcttctcaagaggttctaatctagatccacggtggctgaaggctcacattgcctggtggaatggcacacatacatgtcatctgattatagcctcatgcaatccccaagagaggagaccaagttccacactgacctctggcctgtctaggggatcagcagccctgctctcctttttatcctgcctgtagtctcctgggttatgatcaggatgggggtgttcacagctatggaactatcagctcccccccttctctgcctttacagaagtataggaagagcataagctgtggccaatagcactttcctcacttcagcccaagtaattctgaagaaataatactagtgacagaaagccctaccttacatccagcttcaggctcttactaaggatgtagccctggcctttgctgcttttgctgttgtgaaaagcagccccagggcacagtctgagccttgccctgccacttaccagccatatgctgtaaactgcaggcaagtttcctacaattagaatggaaatattaagctgagcatggtggaacatgcctgaaatcccaggactttagaggttaaggcaagaggatcgggagtttgaggccagcctgggctcaaggaaaaaaacgagtattttttttatccacttcctaattcagagaattgtgaggattagtgagatgatattctttaaaatgatgcgcttattttttttttagatgtttgagtgttttcctgcatgtatgtgtgtatcacatgtgtccctggtgtctgtggaggttaggagaggccatcagatgccctggaactggagttagagacagttgtgagccatcaagtgcttattgggttccaaaccgagcagtaagtattcttaactgctgagcctctctccagacctgaaatacttcctagatagagcatatctaccacattttcctataaataggaaatatatttaatattaacaatgttataaagcttttgtctacataaatatcaggtgtttataacatgtcacataattttaaagacaacaggaaagccagagatgcaatgggacttgcagaagattcacacacttgaacaacatgaaatgataccaagtattgagactgttaatttagcttgaacaggatttaatttgtacctttcaggaactggtaacaaacacaaaaatgtgatacactccaaagcccaaagactcaaactccttttctgatgagaaagccagagtcctgggcctctcagcagaatccttcagctacaataagggattgtgtgtggtcacacagccaactacactcttctcagactaatttctcatccactgcttgggagaaaagatcatacaagaaaaccagcagagatatgggaagatgtagttttaaaactctacctgaccttgtactgaggaggatggggaaaacaaaacaaaacaaaacaaaacaacaacaaacaacctacctccatggcctctgctgactggaatgactcaatacaccacctgttggctattaccaagtggctaaattacatgaattctgataaatccctccggattcattgtcacaggctggctaagtgtctcgggtgacggcattaatctgttttgacaggtttcactttttgatgggtaacaggctcatggggactttaaatgggtttaacaggagcacagaacaaaagagttggaaggatgtgaattaagactctccctgacagagaggtctctttcttccactattaaaatttttgaagagtaccacattgacctcctcctcaacttcgacaaaccagaagttactctcacctctgattcacaagcaacagcaacaaaactaccatcccagagagactccactatttcccatgttccaactccttctgtatccaaatagctcagactccacagagtgacccacaaaccatgctttcggggcagcaattatttagactcttttggtatagaaaagcaatcatcaatttactccaaaggcacagttattaaacacaatgacagcagcacagaacgtataagatggaaccattctctttactttgcaagtaaaaatgagatatagttaagattccataaaagtaatccagttaatgacctgagcatggagggaggggggagagatccagggagaaggagaaaaatggaagatggtaagggagagtaggagggagagggtacatgatggaagcatgtatggccatgagtagaaatttcagttaaatccattactttgcatagttaatatgatggaataattgtaataaaatatactagtgaagaaaaatcctttcaaatatgaaatggtgcctaatagaatgttcagaaatttgtgcatttattactactatctaatcccagcagattttcactatagccaaagaaaaatatacacattagcaaacgctttccctccctccaattgtctacttctggcccccatgcccatgacattcccttattcttaaaatttttgagcatcaggcactggtttgagtgctggagagcagacaactggacaaaataagcttcaagtctgccttaggggaaggaacttctaattccagtgtctgaatctctatcattctctctctccctcccactctctctctctctgtctctctctctctcccctccccctcctctcccctctctttctctctctctcacacacacacaaccactcactgcctcttttgtcacacagaaatatatataacaaattagaatgcagtcaaggattcctatacattgttccactttccacagttttagctctgatcaactgaagtctgaaaatattaaatggaaaattccagtaactcacagttcatatgttcttctttgcctgcacacatctgagtgtttgactgtgggtgagtacaaacacatatgtgcacatgcatgtgggagccagaggacaacctcaagtgttgttctcatgagctgcccaccctattttttgagacagggtcttccattgggacctgtagagtaagctgtgttgtctcactggcaaaagccccagggatcctgtctccacccatccatgtgccaccgcacccactggctttttctgtggatgctgggaattgaacttaggacttcatgcttgtgtagcaaacgcagtcccgactcagctatttccttaacctcacttcaattgcatgctattctgaatatttgtctgtctgttaggtccttcctgtgctttcaggacattgactgtcccttagcccagcatatccatgctgaacacattgccctcccatctatctatactaccagaccaaacgtcacagtgttgcaatatctcaagtaaccccgactttactcactaatcattcataggctgtgatgctggccattcagatccaccaaagagaagcttcctttaagtgaaggagtaaaagttcttaaggaaagaggaacagttatacttgagactgctaggttctgtgctaagcaggatttttttttaaattttaatctgtagaattgtgaagaagaaacaggagatccacactagacttgctgtcacttttcaaactgtaggagttatggctgctgctggtacatgctgtcattcatctcacctcatcccatgtcatgacagagggtagcaagatggatacagcataggatatcttgagaaagtgggaaagtatgttcacaaaacttttattacagtacattactatatctgtattttattattagttattattcttagatttactgtttctaatgtatggattaaactttaccataggttcgtatgcataataaaaagatataatgtatgtagagttcagaattgcctgtgtaattcaaaaattgtcattcactgagttcctttctccgtattccctacccaccccccaatcattacaatatataaagcagatctaatctttcttagactttttttttttggaaaaccactagtaggaattttcctcttctctcctcttagtcctctgggagggctgtgaggatcaggtcaaacagccaaagagaaagagataggaataacatgaggcctgagctgtggacgatctagactgttggctgcagaaaagtcagatatgttctcacatatgtccacaggcctcacctatgtccacaggtctcactccaccggatgtcactaaagttcactcactggatttatgtctcagctgtaacactaaaataagtttctgacaaaagtgaaactcacatccaaaatagcaggtgatatcctaaatcttttgagccttggttgtggtcgctgatacatttgtgtccagtgggataaggtagtgcgattttgttcttttaacattttgaaggaagaatatgtctaactcctatattcactggtcaagatttgcaggcctctgacctcctggatgtcaaatgttttcatcagctcatagtttgcaaaaggttttggtgatgaaacagtcagtcactgctctgaagtgaccagctttctgccattgttactacttatttcctgagagtctaagggagacattataaaaatgtctatggatatcatatcttcagacatctactgcttcagtgagaacagggggttaatgaggaaagtaactgaaacagccttaattggatctaatagggccacaggccaagttctttgtgcagctaaagttgcttataatttatcatcagaacgagagtgaaaggggagctgttaatagataaggtaaggcatcagtcatgaacctgggctgtcccagacaaagcggggaggtgtgtggtcaccctgtgaatggcaccatctaggtaatagcagagagctgggcctcattgagacccagagcctgactctagagggaagatcaaatactactatattacattgcagagcatgccaattactttgcaggggtcatctcttgttctaatctcaggacaggcttaagatggcctgaatactaaacctttaaaaaccaaatgttgaaatgctccatcaagcggtatatagtgagaaacgagtgactaatgggggttagtgggaggagcctccagggggccatgagtgtacagacacagggaaatagcaaggatgaatgagtttggtgtactttttccctttaaaaattattataagggccagacacagcagcacatgcctgtaaagtccctctgcttgggaggtagaggaaggaggatcagagtttaaggtcatcctccattgtaactgtcctggcagaaatgaagacattctaaagagacacccatggccttccatttggctcttagagtattgaagcaatggaacatcagtagtttggaagtccctaagaatctcatgctggtagaagagaaaaattgaaagctgataccaggtccaggaacaacttttctcttgcaaagacattttatacatttctgacttgtcagaccaccttgatggagaggctggagcctagaaggtgatagcaatccaccttgccaaggtaatgcacacctcttgccctctgtcaaatcctaagcttcatactaggatcttggaagatgaacaggggcaagggctctggacctctttactccatttcataatgtcttcaaacttcaaacttcaaatctcctttctttgttctttgcaaacaggtgtgtcatcattgtctactgaggatgggtggccgagtctccgttcttggggattccagagcacaactctgacattaactaccccaatgacaaggctccatagtgagtttgagaccatcctgatcaatatgagacacaaagctatatgagttatatgtgtctcaaaactagtcagttaattaaaataattctaggaaacgggtgcatgacaattttgtcatgatagttcacaagtacaaaatataaaaagatctgggagtaaaaacagccaaattgttccacactgctctgttttttttttttccctgagaaatcaaggatataaccagctttcttctaaactattcatatacacagaaagaattttacctgtaggcaacctttctctgaagcaagcatttgcacttgaataatgatgctggccttctttacagaaaaggggatttatttcaggcttcccaagggctacaaaagttattattattattacaacactatgaatgccttatgtttaaaactcttacattgctataaaatcagcacaaatttataactgataatataaacaagaccacaaagccaataaaatccaaatgaatcacattaattcatgtaattacactgtgttgaaattcatttcctttctgtggcctggttctcctgagcttgtcctgcctgttctgctaaatggcatgcaggagctcaggtttctccttgcatctgcctcctcaggcccaaatgcagccttgggtatcagcagtgctccacacattgtcttctggcctggcttcagctggaaaggatcatttgtaattacagtcacctttgtcatttcagttgatgagtaataagcaaaatccattatttgatgccagggcactgacggccacatgccactgtgggcactaaagccttacagcaacagttagcttcaagatggtcacaagggagtccagaatatgctcaaatggaatttgtttctaaatcttcaaactgaatttcactaaaattataaattccatgtagtaaaggatgtgggtatattttgttgactgtagtatttctagtacttagcagtgtacctagtatgttgtagcacacactttctaaccttgtaggtatacatgttcatacacacatgcatattcacatactccccccacataaacatacacacataaatatatacaatacatatacacacatatttacaacatacatacacacatataatgcacacataaacatatatacacacatatatatgtatacacatataggcatatgcacatatagacacatgcacacacaaacatgtactcatacattcatatatatacacatactttcacagacccattttcaataaactaatgattaaagaatggatgttgatgaaaaattctgaaagagaactcttgtgaccataagaaatatatttacagtcctcaatctactgagatctgaaggaacagaataggccaagaattctaacaacaggtttgacagctgtacacactcatgaaacaaatccagtctcatgctgtatgtccaaatcactgtgggaataaaaaagcatccatatgcaagcaactcattagtctttgccaagaatatcagagcgactcaagggagcacctttgaccagctgcagcactcaagaaagcaggccctgctcctctcttccgcagcacagtagagctgggcctgttgacaggggcacaggtgagttcccgcccccctgcaccctatttctgccatgtgatggtgagggcaagaaaaagatgctctcttccactttgccctgcctgaccctattggtggaggtacaggtgggctggccctgaggtgtgacagtggcatagctgaccccagagccagggttacgagtaggtccaacccaacattccaccactatctatgatctgctggagcatgtgaaggggtgggtcctgcagacccaaagctgcaagaactccacaacatagggcaacaacaggatatccaagaaagtacggtgagaaccggagccaatagtgcagcagaagccaaaggccaggtcaatgactctgcaattaacaccttacaagtaaagatatatgaataaaagggtaaactgtgtgactcactgtgtcacactatagtttccataatgagattttttctttctttttttttctcttaaattttaccttattttatttttgcagggaggttgcaaggccagaggacggataggaaggggcagggagataaatgggctcgagattcatgatgtgaaagatacacagaatatataaaaaagaaagcttgaaaaagaattgcttttgagtagcaaaccccagcattatcaaaccatggtgcaatggcccaagaggcagtgagtgagaacagaactggaatgcactgcctagtatctgccacaggccagcagcaccatgctgggaactcaatatcccttgtttatacttccaagaattctgaggtgaggtgacttcatagtatttcttatttttctcattctctgtctcccctcccttcctccctccctctgtctcccctcctttcctccctctcttcctcctctctctctctctccctctccacccactgtgtgtgtgtgtgtgtgtgtgtgtgtgtgtgtgtgtgtgtgtgtgtatgtgtgtatacatatgtgtatgtggggtgtacaggcacatgcatgcttgtgtgtggaggcccaaagtttattttgggaatcatcctcaattgttcttctactttattcattgtggaagggtccctcaatcaagcccagaccttactaatatggctaatctcactgggtagctgggtagctgcctctaaggaatctcctgtccacctttcaaggctgcaattacaggtgggctccggggaatggaatcctggtcctcgtatttaagatgtaagtactttgaaatgctgagccatctctccagccctatgctcttttttttttttttttgacaaagaaataaatgctgcaaagtgaagcaaactaacacctagggaatgggaaagttggtctggagtctctccagttgaatcttcagttgaattctcagcccatccttgactctaaaagaagtggcacatggcaataggagaacaaggaagcaagagacaacagaagatgatggggtgtcctgtcttcaagagatagaccattaaaaagggaaaagtacatagtcccatttatttctaagaaacatcagaatttggaaactcttttatttttgggttgaatttaatttgctttggagatgagaggttaacttcatcaatgtagaggctgcagcacccaccagtaccctgaggatggatgggcatcatagcttttgattcaagggtcctccatcttcaaagatagacggcatcctggctactgccaccacattccacacttaatggtatttgggtcaagatttttttctaattttgacttctcaaactggtctatgccaactgatggctcaagagagggaggactaggcaggaacagaaccagctggggctctagagacactccttgggctgtaatctcagggctgtttctttctggctatttagctttgaacctgttcttaagtagagtatgctctagttttcttattggtagaatggggatattggcaacagctctcttgcagggatagagagcatttgtgaagttttgtatgcaaggtgctgagcatttttgctataataagaacctgatcaatgatagttactttatcagattatgcccggaaaatagaagagctaaccatgtggcatctgatggaaacaggctgctatttttagattactttgatcataatagactattacatttacctaataggaagtgcataaggctctaaactactccacaactcactctttttataagctgtggtattccccctagaatacttagcactgtatttggaaaagaaatcacagaatctttttaattaaaataatgaatactgttggctgcaaactcagtagtaaaaaatagaaatgtttaccaaggtggaaagtgccagagtgacacatgaatacgcccacaccagattagacacatcttaatccatatggcacacttttgtttttaactgcaaggaatttttgaatatctgttatcatctactaaaaagaaacaagatgagtggagccaagagagggtctatgaccaaatacccacttactatccctcaggtttcaaaggcctggaaagaatatgcagagtgggagattaataactgtttgggaagaaagacctcagcatggcacagtcttatttatttagagctctgccccccttaaaagctgtattcctagtatgctgctccaacatttccaggaagaggcttctatgaatgcctagctcttcaagggggccctgatgggtcattttgtcctcctaagaagtgctactaaagacacaaagagtaattacagcaattacctccagcaaattaaagcaagcagtccctgagtaagaaatatgggttggcctcactcccaatctagcacactttctcaacactgaggcccaattttctggtttctacctcttcctctccttcctctccatgctagatgccccttcttgacaccagggtacacctcagcctggtcttttctactctctagatgttgtctactagcaatagtcagtgcacatagcaagaggatggcatttaacatgctgtgagacctgcttctaatctaaaatatcactttatccaaaatgtcacaatagccaagcaaatagccaaaatatcaatattatcaatatcaatatcaagcaagcaagcaatagccaaagtatcacaatagccaatgtgtaagagagtggtctaggcaccatgatgaatataaaggcaaatcagatatcagctcttttttttcacttaataattttaaaatgcttatcctattcctgatggacattgcactgggaagtgggaagatcaatggtgctgagtacaatcaggttaagattcatagtgtagccagacatggtgctgcattcctgtaaccccacccacctcagaagatgaggcagaaggatcacaagttcgaggccaccttggcaactcagtaagatcctgactcaagataaaattttagaaaagactaggaggtgtaactcagtgatagagagcctgtccgtcacacacacgaccctagtttcaatccccaggaccatcgcccaccgcaagttcataggcatatagttagtttatgtaagtccaaatttaagagtgagatggcatcatgtagcaactgagaattaattgggtctgccctggacaatcaataacggctgttacagttaaacatatcccttccagatttcacatttccaacatgggctgtatttaaagttggagctattaagaggtctttggggtattggaagccgtcctcttccagtaggcttatgtatccctgcacaaggtctggaggaggtggtccatcctttcccttctctctttgccaggtaatacagcaaccaggtgctggcatgctgaccttggatttcccaccactaactctgaggcagtgagtttctgttctgcatcaatggtccagtctgtggtattcttgccttagcagtggagaacagaccagagcagtggctgatgtagttaatggtctgtgtgcattaatttggacattacggccttcagcgagcacctgtggactctcctccacactgttccactgtaagagtcagaaatgtagtgacctgctcagttcaccccagatcatgctacatatttcctgtggacttagggaaatgtaattaaaagaacatagataacaagtagctactgagttgcttctccattgtcctccaaacatctacatgtccccactactcaccatggaagtagcaacaccaaatagtttattctagttgaaaatagtttttgtttttccatacaatatattctgattacagtttcctctccctgaacccctcccttctccttcccatccaccccacccccaactcaaatccacaccctttctttctatttttcattagaaaacaaacagacctgtaaaagaaaaataataaaataaaacaaaacaagccagaatagggcaaaacaaacaaacaggagaaaagagttaaagaaaaagcacaagaaacacatacagacacttctttcaaaaagatggggtaaaatatacacaatctagaatttactattgcaaccattttaaggaactcagtgctactgaagactttcacactggcttgatcattattcttcttcctaaatcttgctcttttagcaattggaggatttattctgctgaatacagatatacttatgtctaacaatgctaaggtcttgagctccagctaccttattgtcaaacctacatgggtggatacacacatatacaaacacacacacacacacacacacacacacacacacacacacacacacacacaccccagagcaacacagagcaaatgcattctcttaaatgtcagtcttaagcactgggtaacatctgtctcctgtctcgaatgctctgtgggaatggttaatcatgcatgactgaatagtgactcaatagtgatcttgcctcaggtgtgggttgggtaattgaggaaagtgacctgcatatttatcacctctagactggccactgtaatatagggctatacaaaggaaataaggctcatctctttgacaggcacacagcggcagatgctagttttataagacattaccatatctcatcagactcttcaagagccattggcatgagtcactgagttgacaccagctgtctatcttggaaccatgcaattcctcttgacctaataccacttgctcaatgtttgatgtaatccttctgtgtacaagagatagtattttaggttctacagagactaaatggtaagtaggatgattatgctcaattggagaagcttcctatggaaagagacatagtggaagtcagaatcaccagctgttttcagtcaaagcccatttgggccacgacaatcagggagctgtgacatgtgccaccaagccagggtaatgggcagagccagtggagaagactatgatgcatggctccctaagttgtcacaagaggggctggggcacaagagccatcaaaagaaattcatgggtaagcatttttcagtctttcattactccctctgtctctatcagtctgtatcgtgtgtgtgtgtgtgtgtgtgtgtgtgtgtgtgtgtgtgtgtgtgtgtgtgtgtgtgtgtgatacatacatatgaaggttaatggacagcttgtagagagtcatctttttctaccatgtgggtcttgggggctaaactcaggttgacagggttgagagcaagcacctttacctgctggcccttccttccttccttcctccctccctccctccctccttccctccttccttccttccttccctccctctctccttccttctctatttaggggccagaaatcagagctccaatcttacccagcagactgcctgctgtggatctggggtaagtcagccctccacaactcctacctccagcacaaggacaacaatgcccactgtcagacagtgtgaggaaatcaccatgtggtctgcaaagcagccacctaggtgtctgttgtatggaaggaagctcttggtagaagagtggcccatgaaacaacatccaccaacatttactgaaagaagcatagtatttggtgttttgaagtaatccaaaagaaatttaaaccttacatccataactcaagctatttatcaagtggtaaagaggcatctatctttaaaagccaagacggtgagatggcttagagggtaaaagtgtttgccatgcaagactagtgacttgagtgtgaccccaaaaccagagggatgaactccataaagttgtcctctagtctgtacacatgtgccacagactgcgccccccccaggacatatatattcaccacatatgaacactactttagaaatgtacattcttcaagtggttatacaataataactcccaaaatctgaggaaaatatggaagcaactggcaagatcttgataaattagggaataagcataacgttcataaataccatcaacatatttgctagctcagccctaacttttaccagctgtgtatacttgtgcacgttgcttaatttctctgggtctttgttttctttgtctcaaagatgatgcaaggtaatgtacacacatggattcgaccatctttagaagtcatacaaatgtaagacaccacgtttacatcacctcaaagattacaggaacaatctaacagtcaccaaaatcagccccttccccacttgcctgtgtgaagcctgggacaaacagaagggcttcctagcttacacaatagagcaggctttatgaaaaaggtcaagctagatatgcattcacttcaattctggatttgaatggatgtggcctgacctacttgttcacatcaacagggtacttggcaatttcatctctctctctctctctctctctctctctctctctctctctctgacacacacacacacacacatacacacacacacacacacacacacacacacacacacacacacacacacacacacacacacacacacacacactgtggtctgcctaatgaaatgaaagcaaaatttccatttaccgtctgtacagaaaagcaaattttcttacaaaaccacaactttttattttgcatttctgtgtgaaagtttcctgaaacctagtctagagcatcaggaagaaaggattctcagcaccccaaaacaatgggtaagtgctgcagtggggagtggtaggccttcccttgacatcctagtctcaaagccccacctgtcttctgaaaagcttggtgctagctacaaaactctctcttcctatcttgccatgccagggcttgtaatcaacaccaaggccctccaatttgtcctgagaattatctagttagtgagttaaacaaaattatcctctaatccaagacaaagcctgacatcaattttgcccattccccttacattggcattgtcagtttttagtcaggtaagggctgagtggaaaggatgtgataagaaggtgggtggttgctgtgataagtggtgttggtccaccacacctttaatctcagcacttgggaggcagaggcaggggatctcgtgagtttgaagctagcctggacaacagagtgagttccaggacagccggggctacacagagaaaccctgtctcgaaccccaacctcccccaaaaaggtatgtggtacccagcctggcagtgggacagggggcttgtttctagggatgataagcaagtccacaatcacctcttgtgtgcctagctgggaatcaccctggactcagaaagttgaggcagggctgtgccccaggcacttaaaccgactacattccacatggaaatgagagtaagcaggcctggccagtctggctgccctagcagctatacaggcaaacagtagccaggcccagaaaggaagagcatcctgagatgcagcagatcatgggcaacaagtgagacagtgctgaggcacagtgaggggactgacttcaaaggcctctgaggacagcagagccacctgcctggccatctagtcattgtgatgtgagagaggctttgatagtgttagcctccaacatactgcattacacagggctttgtgacttaaatacaacacattcacccttctggtcccttgtcacccagtatttcagtgtttaaatgctatgaaagtctttcctgaaggccatgccacaggggttatgttcccatctcctttctggtttccatgtacccaatttcatgacactgttgatctcgccttccctggagagaatctgttcttactgtttctgggttctcctcttattctctgacttttcctttgcccttccctgacttttggtccaggagggatgccactgccacggatgcgtcccatgctctgggcactccacactcgactctatttcttctcaatctgcccttccagccttgctttctccttggagtgtgagactcaagtattctgcatgtccacaacacacctcatactcagccagagcagcagacaggcatctgttctgctggccaactggagttattccaaccacccttcaactccagaggaaaaggccaacagcaaaccaaacagtatagagactgactgctcagctcttgtgtcattgacttaggtttaagttctggccccactacttaacagtgggaccatgggcaagttctttgttctcgttatatcccattttccacatctgtgaaatggatgtaagaataaccccacgataatgttatgggagttaagtaagttcacagaaggtccataacttaaaagggtgctagatcctttttataactcttctccatgaacataataggaacaatatgcatgaataaggcccagcagactcctaaggcaagtggtttatgatcattaatctgccttctactagtgaataagctgtggcatttggcagaagtgaacaaattaattggaacccaatggtggctatgtttagcaacaaagcatgctcactttatcccacataaacctgaagactaggttagatattgccccttaccccatcaaagctgggatggtcttaaagaccatctgatagattggatactgaaccagggaaatgcctgaaatatcaggggcacatctgaaaagtacacatttctaggccctccactcagactatgtctcagttggcctgggatgtgtccaaagaatctggaataataagtgcatgttggattcactgattcaatccattctctttttgtcaaagatgatgtattgaagacccaatataattagcctgtttgcctcatggaggcatggcaaagctcacacatcatccatgtcttcagcatgcaagtgaatcaaagacatgaatgctgtgccatgtgcttaatgcccaggggtgactaaggctgagagtctacatgtggttcacagctaggtttcatgaatgccgtatttgcagagacaaatgctggggcaagatgtctctgacctgtgaggtcacttggtaacaagcatccacaggccagtgccaggggaaacaaagcctatgttatgtttcttccctttgagaagcctctgacaatcttgtaatgtatgcttccgtgtgcccaagaacagctattctaaattcctgccatgttaaagatctcccctaggagtttcagcatgggagacactatttcccaaatgcaaaaatcttctaaaaagcagctcattttccatggtggttttggcaatcacagcccttagaaacagcagtgttgtctttgcgaccagcacaagcagccacagactgaacaatgacctcatgactcaactgtccactcccttggcagaggcacagctcctgctacaaagataaggcctaagctttatcaccactgggcaatatcagacatggtctttgtctcaaatagccaaaccctaacagaaacgtctgggaaatagcatgttcaagagtagcttggagggactcagccaagaccctgttattacactattaatattaagttactaagttttaaaatgcgctttttcagggatacttagatgcactgtgtgtccattttctctggttttctgtggtcaaaactggtcagaggctgcagtgaaacagataacatggggtgatctgatagtttacagggggccctcatttttcatcactgaaaggatttttcttgttttctcatatattctgattacaattttccctttctctgttcctcccagttccttcccatttcccctcacctctggatccactccctttctgtctcttattagaaaaataacaggtttctatgcgataacaaacatgaaatggaataaaataaaatataataagataaaacaaaagccatcacacggaggctagacaaggcaactcaacagaaggaaaagatcctcaagagcaggcataggaataagcggcccattcattcacacacttgggagtcccataacaatactaagctgaagtttataatatatatgcagaggacctggtgcagacctgtgttggccctgtgcttgctgcttcagtctctgtgaaactgagcaagcctatagccaacaaaaaactaaatggagaccaacccaaagcaattcctctaaaatcaggaacaagacaaggttgtccactctctccatacctattcaatatagtacttgaagtcttagctagagcagtaagacaagtgaagacgatcaaggggatacgaattggaaaggaggaagtcaaagtatctttatttgcccataatttcagtatacagtatacagtatacattaagtgtcgctaaaaattctaccaggaaacacctatagctgataaacactttcaggaaaatacaaagttaactcacaaaatggttagccttaatgttagggaatgtaatttacaccctttgtatggcttgaagagaactggtgggcagttgtgttgtgttagcctgtgaccctgagtaggttgtcaatgtctgatttgtgttggcacctctatatggtgtatcttaggacctcttgtaatcgctgtcatgtggatacatacaaggaaggtatggatgtatttttagaaatgtagaggcacataaaatataaaacataaattatcataatcctcattttcactcatatagaacccatatttaggatatattggcaacttgcttctgatggattctgggtttaaaatgtgcaaaagttcccagaggatcaaagtagaatttcttcacagcctgagtcagctttcaatgaaaaataaacattttctaaatttaataaagaatagcatgaatttataatactgtgagcattaaggtgggtgtccagaatgcacccgatcagtacaaggtggacaggtatatgcttgggactgaagcacccatcaggcttccaaagccatgatattcatctgcactctaccacatcctctagtcagaccagagcagagtctcggatggaaaaatgcatctgagttggaagcatttcaatacccaataattactttaatttttagtaattattctgaaagtgctcatgataaacattttctgtgagagcacggacaaccagctcaattcctgtccctgttgctacaatgaccccatggagcccaggtgagaagcctggaaagccacaaggacctggttcaagctcttaccaaactagaccttcctcatctgaagactaaacatgtcccaagttttagaaagcaatctgctaaggtcaaaatcctaggaaatcagtctttaaaaattctatagcagtgtgaccaaaatataatcaagggttttaaaagcaataacatgatttacagcttttcacaaatgcagacacttagcaaatatccagcaacaatacgaaaaagtatgccaaattcccattggaaagaaaaaaaaaaaaaaaacaggtcacagtcacctttgttagttagacttggagctacaacaaaagagccagcccccagcagaagcctcccaggcatctggccttcaggctaccttcatggagcagacaagtccaagaatcttttggttatggcagcacttaaactcaaatttctccgtaagccatacaaaggctggcctttattttagacatattttctctttcctaatatgtcacagccacataagtctttgactcatcctcaacataccaagagtgcaccagcataaacttctggaatgtcttctcccttcatctttcccacagtccatccctccagatgttgggatctcattcaaagtagtattttccaatgaagccctcccaggtttatcagcctaaagttcctgaccagtcacccttgatcatgacaacctcattaattatctacacaggacagatccccagcttttttttttttaatctatacttttcttaattgctttaaaaggagtattagtgccttaggaactaggacttgcctctattgatcactgacatttccagcatagaactgtggctgtaagcccacaggccagtgaggaaaggaaaccctgaaggtatctgatgagtgccacatcttgaagactcaagcatgtggggtcagaaagaagccactcatggtcccaattaatttaaatcacagttctctgccaggtctaatttaattaacacatagttcacactttcatttgttctttgcactactgagtcaaaacaatctcccccaactatgagaagttttggctcagacaatgcacaaggtcagcttgaatgagcaagagtgcaatgcatgccactgggcttggatttcatagatgcctaaatgaccctctgagaacaaatctagcagattcattcctaagtacatgattgggttggtgtatccaacatgacccaatcatctggaaagattttactgaattttggtaagaggtttcctggggagactcaaacattaccattgaaatgctattctgggtctaggagaagggcaatttgtatgggtcatacgaaaaaatttattcaagtatttagatgtagtattgttctagaataatcggtagattcaaaatatacttgaggagctacaaggtcatcagataacaggtgcatcctggtgaaacatgaggctattctgaagacaagttgaatttcagccacctgcaacagactggaaggcaaggtcagctaaagaaagataaaccaaacttcagccatgagcactgaccagaaggtaagggcaactgtgctgacttagatttgggttataaagcacttgatgttgcatggaaaatactattctttgaaaaaaatgtacattagaagctattggtactactagagaatggtataaaagacaatggtggggaaattttaaataaaatttaaatcagtatttctctacttgaatatgcaatcattccccccttttacagtagaggaggcacagacatacatgtaacatacaaaagagcaagaatgtgatgtaagcacattgcacagacagcacctgaaaaacacagactaggacagtggcacaagctgttccttggccagcgcaattctgagaagcatccggcacttcagtctgtttatgtgaatttactcataagccttggctaagcctcctggagagaatggaattggcatatgacctttccaaatctaagagaagaaagagttattgtgattttacattcatttcccaaggcatgctgctaaccataaaagccagtggtgtctctcctcatatatttacctactaatgccagcctgtctattcccaaagtttataatcctgaggccagtgggaagaaaaaacagtacttacgagtagggagacttggacaaattcagcatggttatttcaaacagtgcctttacttttgtaattcctacctccataattctggctgtcagtgttcccaagtacctctgagtcactattcagaacttttcaatcaatgtgacacactatgggcctgttctttattctgaataaaactaatgctatctgtgggtctttcttaaaatgttttaatagaaagccattagcaagagcacaaacatgaataaactacattataattataaaaacatggaccctacattttagaaaatttaaatatctcaaaaagtgatattgctaaaaaatctgtcaagggtcactgtattttttcctctctgtttcccccttttaattgtcagataccactgtctttaggtttgctatagttcagtacggttaacactcaccctagggtttttatttttccttctctgtcagtcagactctgaaaaacaattctttcattaactagctctcaggggatatgtctttcctctcctggcttgcatgagagggcagacattctaattttatagcaaaaacagagagaaattgtgggtgggatgtgcttccccctaactgtagaactcttttcaacagagtgtgtgccatctgggtgttaatttgttgttataacctaaatggctttcctgggtggcataatgagaagccgagcagaaatatggttaatgccacatgaagcatggatgacagctagccaaactctcccatcctctaatgcagtctctgtttccctctgatatcctcaggagctctctccacaccacaagtaaccacgagggatcccacaatggaaagaattatgggacataaattagttacatacctaggaacagaaaagcgggccagttagtgccttggtggtctgtcatcagtgacttagtagaagatgcaatagtataaccaaaggtcagaagtgctggaagtatggaacaatagagtcgtgcagcggaccccaccgtgacaccaaagaccctgccttccttctgtaagtgaccatgttgagaaatcaatgtagcaaggaactgtgggtagagcccagtctacaaatagcaaaagtctgaatcctcagtggcagccacagctactaagatagaacctcagtgagtactgacaaagattcttcctgcagagtagaatatagcctgaaggagccttgactgcagctttgtgaaatcctggtctaggcccagacttctgccccatggcaaatgtgtggcaagagatgtgttattttaagttgctaaatacatagtggtgtgctgtgcagggacagaaaactatacactgagagaagaaatgagggtcctgtctatccttacactgagtcagtcagcctaagtctctctgaaggattccttgtcaattgccctcttttgaaaaaaaaaatcataggaagacacattcagatggcctaacacagagctgtctgagctctgtggaatgctccaaaggatgtctgtcagcttcttggatgctctgagttctacgatggaaagcttattaaccagagcatcttctgaagcagataatgaaaaataatggccaagagtgacatgtcccaaaatcttattacaccacacaggaagcttctaagtagcttcacttgaaattacgggaaataaagaacagcgagagacaatcaatttgtcttcatctgctgacgtcttgcaagtgagattccattaagtctctgtacccatgagctcacagaaaggttctcaaatagaagtgaattacaaagaaaaggcccaccttacatgatcttctaccttgaagctatttgaacaggactgtgatcctttgtgtattaatttactcctgtggtaattacataccctataattccaaaaacttcacagctttaaaacaataagatgggaatattgaaagttaaccagttattttttaagatttatttatttattatgtatacagtgttcttgtctgcatgtgtccctgcaggccagaagagggcaccagatctcattacagatggtgtgagccaccatgtggttgctgggaattgaactcaggacctctggaagaacaaccagtgctcttaacctctgagccatctctccagcccatttttttttaaagaactacattaacagtaactttagaacatgtggcccctgcaataaagcagattaaaatcagatttggaaactgattctgacttttaaacatattctgagtgaattaaggattttgttgatacacactaacactttttcaatgcccattgaaatagttgatcaatgccatgattagctaatatttggagaatttagtggaagttttacttcctactattattagacaatagaagttaacaccagactattctcaatattaatcatggtactttagaagcaaatagtttctaaggttctttccaatgctacctaattgtgattaaccttcagttttgaataattgtttctaaagcatctaaaggcatttaagagctcacacaaagaatgggcacaaagtcatctgcataaagactgtcaagttgtataaaatgaagtaagaatcatatcttgtgtcactacagatggtgatgtcctagaaatttctagaggggtaaggcatgacagagatctggaaactgacagtccaagttgagaattgtggatcatctgtgcctgaggcgagtcaaagggccaaaggctgggtatttggacacattaggggatggagccacccatcacacagcatgtattcattgagctattgtgtaccgggacatcatgtaaaactagtgggcccttgctgcactacagataatgagcaaggcggcagacaacagatcaaggtgatttctgagcatcaagtttggtcaactcaaacaaatatattagtgagatcctataccctgtcagccagtgttgtggagcctgaattatgtcagcaaacaaaaaagacagggatgcccacccccatggagatcacgtcttagctgcgtaggggaagacatgtaattataaagagcactgggttatgtactgtaatgaaaactagtagatctaggttaaaaaagtaagtagacactgagaatgaaggtgactggaagtgtttatgtggaggtgcagtgggccacagttgtaaaaggcggattcaggccaaccaccaatgaggtgtcatttgagtagatctgagggaggaaatggaccatgatgtagggaccagagggtcatgggacagaaaggctaatagggatggtggggactgctctaaatggagtagccaggaaagtccttttggagaaaatgaaattttagctgttacagtgcctgcaaggatctatacatggacctagaagcagaatgttctcaggaatgggcactgtaacacaaaggtcccagtatcagactgtttggcctagaggtctacaaagaaaacctgagtgagagggcatgatgatcaagcataaggacttatgccagggtcagggccagggtcagggccagggtcagagccaggtcatctaagttgcctggatctttagttgctctcctgctaagctactgaattcttcctatctagacatttgagtttcaaacacattctcttaactctctcatgttcctggttaccactcattttcttcccccctaagttcccccaaacaatgaatctagacatgcagctccttgactgccccctccttgcactctttgcctcaccttgattgagtatctgcccaacacttcttttgaaagctactgatggtctccacacagccacatgggagggccacatggcctctgctcctcaaaccttctgctgcctctggcagagatggccatgcttattttctggaagtgatctccttccctttgccatcacagccatcctcactttctcctgccctttctggatactcctcaactacctattttggaatccgtgaataaatatagatgtcaatatggaaatatacttagagggtttaatgcactggaggtgcatccaacagccttgctgactttggttgggggcattcatttagtccacagggaacacattggactaacctggagatctgccagagtttgcactttctaatgatatgacctctgataatataagacatctgcaggccctaatcccatcatcagtaaaatggagattttaatagcttccttgtgaggctattatgaatatgaaatcattcactaaggtctccaaccaacacctagcatttaacaggtaccattttctttctcatatcccccagaagctcagataaacatctttctgaacaacaggggaaagaaaagtaacattaaaggggaaagacgctgttaaatttgtgggcagggtcattgtgaatgatccaatcatcttagttaactctgctttataaatctagattccaaacacatcaaacttctgaagttacctttttgaggtagcaacagaaaatgagtattaatctttatggtacaccccagtctcactcctcagatgcattttatgtgctttttctttattgagagacaggatggggagccagctttggagcctggctttccatctctaccctgtaactcggcagctgagagttttcagaagacctgtgttccctatgcctctgtaacattgggctagttacactacatctcatgagctagtttggaaaaaataagtgagttaatacagatgaaatacttagaacggtacctggcacaaagttagcacctgataaacatgaaggtgacagctgctgccatcactggcgctaactcctcaagcccatttagtgatttggtaccaggcatcctgcttttcctcacttgccatttccctgtgtaaatcactctccgtgtgtgtatattacgggaagtagacatggttgggtgtttcccatctgcatctgcactgactgatgtcctactctgctccagaagtggattaccttagcctcaggcttctgctggattcagcaatggaagcattggtagaggaaagaggaagaggagtaagttctgggtagctacgccttagctcctggatggctgggtaccacagttgctatttttttctcaagctgtggctctggctaggcagcctctaatcatccatttcctgatcctgatgaggcagagcagaagtgaagtcccctcccctactgctgcaagccccagcatgcttcctaactcattttgtcccattctgtacattctgttttagatggtcttttcattaaactcttctacatgagaatgtttcttgctaggacccaggatgaaacacaggtttcatatagttattcaaaaaatgatggtaatgtgttatattattttaagatgtgttacattcatgtatgctgtggaatatttgtttaatgatgcaaagatgtgttgccatcttttatgttgcatttgtttaaccctgtgaagctgtgttactttacctgtctaaaacacctgattggtctaataaagaactaaatgaccaatagtgagggaagagaaaggataggcggagctggcagagatagagaataaatagaaggagaaatctgggaagaaaggatcaaggaatgagaaaaggaggagagagaaaagaaggggccagccacccagctacacagccacccacggagtaataagtaaagaaaggtaaacagaatagagaaagataaaagtccagaggcaaaaagtagatgggatcaatttaagttaagaaaagctggctagaaacaggtcaagccaaggctgggcaatttataaaaacaaaacaaaacaaacaaacaaaaaagcctctatatgatttctgtgggagctgggtggagtaagggaaaggagtaaaatcacaaccaacaacagcaaggtgacaccttgaccccttattcaagggaaaagcccggcatggaaccagccagagattctctgccaggcactccacttcaaatctgtctgccaccagagtagggcagctcacacggagggcaaagtgaaggcctttgaatccacaagcttgcctgggatgcagatgccatttcctctgacaacaggcagaattagaggatctgctgatccccaagctctcaatgctcagttctctccctacccaattcaatccgtgaggcacttgacacctcgccctggagaacaagctcaaaggcaagcgtccccagtgctatctcatcttttccaagctggcctggaggaactggagttagatgcatcctgctggcaaccaggcccttggtggcactctatgccctagggctgcagcacttaattacaaccagcagagtaatttcggaaggtgacaccagcataaactttcagcctcacagtctgagctaatcattagttgcatctttaggtcataatctatatgagacaatgactccataagtgtgtgtgtgtgtgtgtgctgctgtagtgctttagggacacaccaacactctaataacatggcagggcaagctctggctaagaaacagttgtgatgtgttctcatccagagaaactgattgccttatacaacatttcctgcaaacttaattgaggatcccaaacattgggcgccaagtacacaagatctgcaactattttaatatttttaaaaatcaaaattatgaacaataagtgctgaagttacattttagtaaaatgtagataatgtctaaatgtagagccagactggagaggttcaacatagggaatggaagaaaaatcaggtgaattgggccaacctccctgtttaattgcagctcatggttcaggattggtgctattaccaacaaatgtctcttgcagaatccacacagagcagcagtcagcaacctgcagcgatggggtcccttcttcccaaggacaaaacaactgatgagccataattttgtttactcaagagacatggttctgaatggctgtatacaaatctgatttctgtgcagacaatcaaatttgaaatgcactagggaatctggcttcatggacagaacactcaagtgaatactttgtaaagtgaataatgaagaccttgcctctggccctcacttcctctgtgtttacaagattaactgctggcttgtgtgtgtgcaagtgtgtatgccatcattcagatatcaagctgatggagcccttggaagtgattaaaatccacagaagaaaatagaagcttgggggggtgtctaaggaaagattgggaaaaatacttcacttttagatatctgagtgcacatttggaagggcatgagaaccatataaggaataaaacttcatgaagtctcgggagaacaggatagagctattgactacaacggggcttctcaagctggagggttcatgcccgagaactatacaagaacatgcagaggcttccattcctgccacaaatccaagtctctcctgccgtcgtcatttaccctacactattctattagttctaagtaaaaaagtttccattttgcatggagaacttgtggcagaagacattttatagtgctgtattcatccattgattctcaaatgagtttgcacgagcctgtgggaacttttcttcttcagtagaaacaaccctgtcatagtgaatgtgaatgagaggggtcaggcgaatccacgaagtgggccatctttgaaaattatatatatatttcttaagccttcccatgaaactggcttagactattgtttctcactaaaaggaaccagagttctcagggggcgtggctgatttcaggtttgaggtgaaatatgtgaagatgacccaggaacgtttgacaccagaagcaagggaccaccacagactgccaggagttcctcaagggacaccggaagaacaggcttctgttggccaggcccacgtgaacagaagcatgagtgtattcagactcgccacactgcagtccatggcaatgctcttccttgctgtctattgctgatgctaacaaatcaactcttcactttgcaaactagggaatgcagagacagagagcttgtgtttgctctgccttgcccatatgaattatacttcagagtaactagatattgacaagaataagtttctctttatagcgtaacttcaaccaatacatataagaatggcaaaatttgaatgccgccatttaaaaagctcccaataaaataacatttttagaagaaaattgaaattatctcccccaaaatgatacaagtagaatctgatgaaatgtctacatcttcctgctaatttacatataatacagagaccagagggcatgctaaatgtgcctgtggaggaaagagcaactccacaaaatccaggctgtgaggcatcctccaggaaaaacaagcttcattttattttctgaataaattacacagggaagagataggcaaaagaagaatatgaattaaagcaagctttatccagatttgatagcatccattgtgtacacatgtatatatacaattcccaatatcatcatacacatcctactataaacaaaagagttgttttgaaagttacttagaaacaattacaattttaaaacataatttcttatttggaaatcacaaagtactatgagctctcctatttggacaataaaacagatttggataacttactaaagcaatgcttatctggagcccaggcaggtcatcccttggtagaaatttataattattggaattcatataatttgcagtgtcttgcttcataatgtaagttaatatttcaaaaactttaaaaattatttaatgtatataacactgttgtgaagagccaagagtttaaatttgctgctgagagcttggacatcacccccattatgtaacaggcacagtaaaactattattatcccttaacttttaaggagaggaagtaacttgcctaaagccatatagccagtttaaaaagccacacaatcatctcaatgcatgcaaaaaaaatcatttcacaaaatccaactcacatctgtaataaaaattctcagcaaactagaaatagaatgaccttgacaaagggcagcaactaaaagccctacagctaacacaatacataatagtgaaagaccactttttttttattacttcgatttagtactgatggtcttagccagtattataggcaggaaaaaagaaataaattttgttattcgctgacataatcgtctatgcagaaaattcctagcaatatatgtaagttataaagctcctgagtttagcaatgttgcaaaatatatggccaatataaaattatcaattgcatttttatataccacaatggctagaagttgaaatggaaacatccaaacttacatgcttacaggtaattttcacaggataagcacagtaggaatgataaaccattgggaaaaggaattaagggaaaagaagtaagttggaagtctgcccctatggctcagaagactcaatagtgttacatgtcaaccatgcctaaaaggatctacagatcccatataaaaccagacaaatctcaacagtgtttcctatagaacttgggttctaaaaattgtgtggaaatgccaaggactttattataaaaacagaaagagacacaaagttggaagatcatactatctgaatttgggacttacaataaagcttcagtgcaacattaacacacgatcaatgctagaccaatagaacaaaacagagttcagagataactcaccacatatgagaagatgatttacaatagaagtgtttagataattcaatgggggaatgaatattaaaaaaaaataaacctgacactggaacagctacttgtttatgaagaataaagaggtctggggacatggtccagtggtagaatgctttcctggtatgtgtaaaagccttaagttcaatccctagtctgagaaaggagggagtaaaaaaaagggggggtgggagggggagttaagagaatagaacaaaaagaaagaagaacttggatgccctcttcttactatatacagaaattagcctgaaatgggtcagagagacctacatgtgagagacataacaataaccgttctagaagaaagcatggggaaaaggtctctggcttggggttaagcaatgatggcttaaatactgcataaagatgcacacagtgagaacgcaaaagctgacagtcaccaatcctataacgtgggcacctctctggagacttatctaaccccagtttccccacaatggccccatcctgctgataatgaagactgtttctgtgtgagtgctggaggaaacatttaaatcatgacaggaagaggactgaggatgggttattgtgactccagacacccagggacccaggaatctgtgacagatgctatttccttgggctcctcggtaccttcctgagtaggcatcaatggactcacattctcctagattaccagtaaagggggaggaaacacacagctgactgttttgactttgtcaaaatttaaaaacttctatcctctaaaggcttatgatggaccgggacctacagcttggaaacaacttttacaagccagtaagataaacaagccactaaaagtagaagcaaaatatttaaatggacactttactaaacacacacacacacacacacacacacacacacacacacacacacaactgccacttgctgcatagaaaacgattcagcattattttcataaatacaatgcagcatactgtaaaagatatagatacctagatatttgaccagacattctcaatatatccacgaagatttcttttatgagattaacatttaatggttgaaacccagtaaatcagattacccccataatgcatgtgagcctcaggcaaacagttgacagctttaatgaaacaaacctgacttttgagcgaggaggcattccaccagcagacaccactgagcttaagtttgaacgcctcgctgggtctccagcctgctagcctagccggaagacgttatcacctgtctacagttaaccagttgctcagttgccctccttccttctgtatgtctttttttctctgtcttaccctttcccttctgtcttccctctacttttctgcctccatctgcacacacacacccctagtctaacacactgtgctacaaagtcaagcattaactagctctctgatgaggaaagtcatctgtaataacttctgcctctagcttctgcttcatccctttatgtcttagtcttatctcttgctcttatatatggagactggaaccaaatgtttacacctttgaaaataaaccagcagccgtattcttgtagcagttaaaaagggggaataaccaaatacatatcaagcaatgaatggcttaaagaactgtgataatggaatacattcagcaataaaaagaacaaactgtagatccgcacaacaaggatttgatctctaagtaccatattgagtgaaaaaaatagatacaaaaggctatgtatatgatgtaagattccattcatatgaaactctacaaaaagcaattttgtaaggatagagatcacataagtggctaccagagactgagtgggccttgggcctcaggggatgactgagggacacaagaaccttttggaagtggtatgaatatttgaaattttaatttaattctatttttattactttatgtgttttggtgttttgcccgcatgtatttctgtgcaccatgtgcatacagtatctgaagaggccagaagaggacgtcagaacccctggaactggaatatagatggttgtatgctgccatatgagtggtgagaacacgaacagacttcccgatggcttgggactaggacttggtatgcctgtcctcctcagcgcccatgctcttgtatctgcttcttttccctttctgtctcaactcctttcctctctactcctctttacacataagctaaaagcccagcccagccagttggtcttctatctattcatcacgtctttatatccaagttctcaggacaatcaatctgactgattgatcatgacatcctggctacatatccagggctcatatctcaaggcccaatgtccagtgagcaagtgaaattagtttagaagatagtgctcacttggggagagaagatggagcagtgaagaagcagtcagcccctgacctaggaagcctacctggagctaatcccgactactgctttcacgtacccttcatcttcctctctgcatgcaagcctttgtacttcctgttgcctctgcctagaaggctcttcccacagatactcgcaggacgtgctccctctctttatgtggccttctctgaccaccacatctaagatggcatcctctgtgtcaatcacagtgtttgccatcactctgccttatatttgttccatcactgtaaaaaacattacttgctcatatgtatttgcttgttagtttattatctgtttcccttcgagaagagcagcctgcatttgaggaagaactgttacattccctacattcttaccgggattccccatactgggcacagagcaggggtgaggtttgtagggaggaaatgggaatgttggtgaaataggctggagagagaacaagcccaagtgccctggaagtggagtctgttctgagattagctgggagctgcagctctgagattaggtgggttctgaacaaggcatgagagtggtactccagggagatgcccgttatcagtagcaatacagtttctagtagagacgaatgagggctcaagtggggttataatagagacagccacaggaaataagagataaatctatactttagcaattgactgaaggtgtgtggggtaggaggagaggtggagtggggggagtattaggtactgccaaggagtcaatctggaagcagtcactgggtcatttagtagaagagccagggcagtcagaaggaggctgaaatggaaggttttaaaagattgcttgagggtttgagtggctacaacttatacagagtcatcttacttgatcattattctgataggtgggtttttttaaaaaaaaagtctaatttgttgaaggcacataagccaagagaaatgaaggcagtttctctcacatgacaggggcaggaaagtggccaggtgttaaggcacttaaggcagggactcaaaacaacatgacacacaacagacatgtttctcttccccaggcacccacaggccaaactgtattctgtgtggcatgttcaccatttcatgagtacaggcagggccaggcaagacagctctcaaagtgagagcaaaggccagatacttgctctggggtttctactgcagcagctgggggagagactgagggggaactgagctctggtagtcaggtaacctgtgaagaggaggaccctgggaatggttttcaagtcagcagctgtcactaaggtgaggtcctgacacagaaccagcatggtgtcgagagcttgctcactcacaagaggtggcgttttcttgtcagaccagttctgaggtcttctgtgaggcattaattcagatccagttcagcaacaactcagtcactcctctgcagttagctgaagccaccttccctgctctatctaaaacttcttcactttggcctgtttctccaatgactccaagacaggaagagcctgggcctctctagccctgaccctccccccttctctgaaaagtgtaggaggaagttctggccactccaggaacctaaactctaggcgcctctctgcaggtaggtcaccaggcatgtggtagcaccatggggctgagagttggaatgatgataattccagactgtcctaggtggcccaacacctaaggcacagcctccagcttggcagtgtcatgggcagagctccatctgtctcctcattttttttttctcatctggttccaaagctgagaggtatcttcgtccatattctgttgtcataataaaatacccagttagggtcatgtgtaaaggacagtggcttatttaacacattcttctggaagctgggacatccaagagcaatggcattcattgtctgactgcatcatgacacagcaagttgtgcaagcatgtgtcagctcgggtccctttaccgaccttgtacagtcaccaatcccataacttgggcacctctctggtgactttatctaaccccagttttccctcaaaggccccctcccgctgatactgaagactgttcctgtgtgagtgctggagagaatattttagatcaatacaggaagagaaacgaggatgggttatagtgacttcagacacccagggacccaggaatctctgacagatgctatttccttaggcaccttagtgccttcctgagtaggtcctgggacccagatgggctcacgctcttctagattgccaggaaaaggggaggaaacacacagctcactgctatgtgccagtcctgcaggcagcctctcttcactgcctctagagaaaacgcaccattacttaattaataaccagacctctctacaatggtccagtgttttagtaacagcggcacagaacctcagtcaccaaatgaaaacctgacactctggccagaggtcttattaacagcatggcattttaatggttattatagggtgttatttttttccttcagaaagcagtgttcaaccatagacagcttatcattgcttaacgtttttcttcatgaagtatacgaaaagaagccagccctagcatccaaaattcacagaccttcctctgtccttacgttatttcttgcctccctcagataaaggaagtttgataaattatgactcttaaaatccatccataaagacacatggctgtccccaaaggtctatcagtattttataaagtagctggatatggcgaatgctttaaaaactatgaagtagccagccaaatgccagacattatacacaatcttcatttggcaactgtcagggtggacaataaccaaagccagtcccttctttctcaggtttcctgattgtgtcctccccaagttcgttcttgggttataactcaaggccacagaagccgtaatttaaaacactcatgtcatcaagcaaaaagacaaacttcaccaaatgaaagtggcttccagagagcaccagagtctgtgttatagaaatgcaaggacacaggcacgcaaaaagggaaactattcttgcagagttgttttccaggaaacccaacacacactgcagagtgacaggtgaagcttgagtagccctttctgaacaaggtgcagagcactgccagagctttggtggctggtgttgggggaccagggtggggttgggagagtcagtgctcacaggccaggactgcaaggccctcaggtactctgttcagtgtgcagacagcttgtcacctggctggaggggagcagcatgctgaacccttcctcccggctcctcacagttgtagccaaggggctcctggccttggcatttctcaccaggagtggtgattgggagaaatcaaaaggaagatgaggaaagggtgggagaatgagacttttcgggagacttggtcagatacataagtggcagagaacacttgaataaactgccctgtgcatggaaaggtctgctcccaggtcacttttctggtaaatcagcatgggaggctgcaaactttagtaccgtccaggcttgcctgtgtctacacacaccacctacctagataaacaataaaaacatcaaatacttataaaccagtaaactacatctgctcagccatttctcttttcaacatatctgttcacgacacaatggagaaaagtatttttaaaccatgaagcggttttcaatgttgcaggcatagaacacccagatattacaaagttctacagtctaaggacttcaaggcaggcccctggcctccccagaaccatgtgcctttgagcagggcaagtccagataccgtccctcctggtaggctgttgctgggatttttgctttgctatgttgttttttctgcttctcagtatgaagtttagcctggccttgtgtgatcctcttgcgtcttcatttatgggattatagacatgtattccatgctgctttttaaattttatgtggacagctgttttgtttgtatatatgtgtctgtgcacacaaaggccagaaggtattggatcccctggaactggggctacagagggttatgagctatcatacaggtgctgagaatcaaacctggatcctctgggaccagtgctcatacccccactgagccatctctccagtccctccatgctgtcttgtgagagcacttgatcttccaaagctcaaaacatctggaccggctcatgagtttaatttctaaatctgtgatgcttaattagcatacccactggtgcgaaatgccccttggagttttagatcttatgtctaagagcccaacttaggctctttgctggggcctcatacccacctgatgtattctttacttcctgcctaccctcccaactaaatgctttttaataatttcacctcctatttagtgactgaaacctgggagtccttcctccagctcactgcccatgattccctggcctcctgcaccagtgtgtttcattctaggaacttttcactctgtaaaatcagaactgtgtttcctcttccagccccttcccagtataggatcaggaaaggtcccagatctgatcaggtctgtttgaaatgctaaaatggcttcctgttgttcagggtccctgcagctctggcctggagctcagtctgcagccagctgaccctcactgtcccctgcagacaccctcttccttccaaaactcttgatgcaggctctcccccctgaccaagtcacttccccaaacaggttgcacaggatgggtctccctgtcacatgctggcactggcacttaaaggttggtttctctgggtctccaaggttctggaggaataatgttctcctctaactgaatgcccagatgtgacctcctagagtacaagggggaggggttgtgattgttgaagacagtgacagcaggatggcatccttcaaacccctgactaatggactctactaaagtacatgaagacttcagctgcttcagtctaaagctgagaaatgcccccaaatgagaaagaagtgttcctccccatgcatcatctaaaggtttaaagaggctgggttaaaaagcagtacagtttgctatgtgtgcacacgttctagagctgcgtgagaatcctggctctgtagtgtactgactcccaacttgggcaggtcacctaacctctcttcactccattaaaaacctctgtctccatctgtcaccggaggtttgtgacagcggcatacgctgtagagctgtaaggaccgagtgagctgatgtatttgttatatgctctgagcagggttgaccactgcaagcatcgagtagacacctgccatttcattcttactgggtgtgttttccgaaagagcctgcagagcattctggctgaagctgttgtattttggtcacaacagaactcaaagcttaaatctaaaatgtcaaaattgaaatatccactggctttttttctttcacataaaactgttttaatgaaaatattctgaatgaataaccttgttgaatcagataaaaacaaacaaaatgcctgctagtggatggttgttggcttaacagagtgtgacaaaaacattcctcaaatatgcataataacctattcatctctggtgaatccacacgcaaatggaaatgtttacctttgacacataaagaataaagtacaattaagtttagttctgcttcacaattaaatcaaccaaactcaacaagtcgttgtactaaggcagagcacatgtacacaaaaccacccaagtgaacagaataaagactaagggctatagtttagtggtaggacacttgcttagcattcatgtacatgaacttgattgcgtgtgcagcacacacacacacacacacacacacacacacacacacacacacacaaagtcaacccaaaaggaacttatacaaacttaaataaacagtggaataaaatgtttccagtagacatatgattatttctatgtccaaggaattcaactcctaaatacatactcaggacatatgagtcaggatagatagcaagattggtcaagtagctaagtcatattagccccaaatgaaagagcccagctgtctatcagcaagagaatggataaacaaagtgttgtgtgattatacaactggatgccatatattagcgagaataaacaaactactaatgcatgcagcaatatggatggattgcagagaaattatgtcgagtaaaataatacagatcaaagatgatgtaactgtattattggtgtatgggattgttgtagattgaccttgaaccccctcccaaagactcaggaattgaaggcttggtattgggaaggggtggaatgtttaagataggaatccagatgggaggtctttcggtaatcgggggagcatactctccaaacaaattccaggacccaagttcctccatgctctctggccttgaggtaagcatttgctctcacacccacttctgccaagacagcacattgccacatggtcagaaacccaaaattgtgagcccaaataagtatttttttctttatgattgtctcaggtattttgctatagcaatgaaaggtttacttgcacaatgattatctttatatgaagcttaagaatcatcagcaaaagtcagtaagtcacagtactgctactgcttacccccaaggagaaggaaacaggtatagattagggggcaagagaaactcttaggggatgtaaacaatgttctattatcttgatttgggaagtgattccattgatctatatgtgtgcaaaattcatcaatctttccatgtatatgtgttttacttcttttataaaaatactctcacgtagtaatttaaattatgactgtatatgaacttaacaaaatgagtttctctttgcttattcaatatgttactggagagttggcagagtgatccacccacaaacacacaaagcaaattattatggactgaactgtgtaacccacaaatgtcattctctcaagccagaacccctaacatggttatagatgaagatgacctggtaaaggcaattaaggcaaatggaggaataaggttggtgaaacttgtgtggaagagctgccagggatgcatatagacacagcaagaaggtggtcatctgaaagccaaagaggaagcttccagagaattcagaaccaccaacctcagaccctaacttctagccaccagactgggagaacatagtgactgcttaagcatcccagtctggggtgttttgttacagcatcctcagaagactaaaacatcaggaaaagaaactttcaagacaaactccaggttggcacaggccacggaaagttggcttctgattcttgctatcagaaaaacaaaggctagtcagacctatctgggcaaggacagagtagggactatgttgggagtagaggcctctctactgccaagggaacagggtgtgtgtttcctctggttttaatgtgggccccacaggagcagcctgaactgggagagctggtttaaatcttgacaagtttaacactactacatctggagcagacctttccagtgctaagtgcatggtagggaactaggagctgctgcaaaggaactgctgctgggggtggggtgcaaagtggctggtacaaccacttcagaaaactattcagcaaaatctcttaagataaatacaccctacaaaattcagcatgtatatgcaccaaaataaatgtacatgaatgttcacaatggagcaacatcagtgtcctttaagagaagagtaggtaaacagtatagtcatacacagactagacagcaaagagaagaaattactgatacacagaaaagttggatgtctaaagtaatattaaacaaaggcaaagatgctatatacaaaacaagtccatttatatgaaaactgttcttgggtgacagaggtcagaatggtgcctatctttggggttgggtaacagtgactaagaagggacctgaggtggtttctggggctctgttctaaatcataatccaagtgctaattatataagttttagatatgcaaaaattcaacaaagtagacacctgatgtttctattctctatatttaaactatgctacaatagttaattaagattagataggagttttgaattctattgctatactagattgtagtccatgattgacaggctggatttgactttttgccacttaagtagaacagagaaacccaagggacttccccaaatctttattctaacaaagagaagccaatagtaggaagtggtacagaggaactgagaagagcttgagactctgccttgtgcaccccagcaatccatcagccagttgccctgttctggacagaggacagtgtcttgaatagcaagacagagccttctgatcctgccaaagtgactgcttcctgattatgattcaatgccaaagatgaactgtggtatgataccatgggaggtagagttcctttaggtcttttatgcaatgcttacattggctaattaccaattactggactggtttgcatgaaatatcaggaatatattttttacaaatttttttaaattgtatttttaattaagtgtaggtgtgtgcctgtatatgggttaagtggatgagtacagctacctaaggaggccagaagagggcatcagaaattgcagacagttgtgagcttccccctacggatgctggtaaacaaacatgggtcatctaaaagaccaaaaagagttcttttttatttttcagttcctgtctttttatttattgttacacaattacttgtcttctggtttgttgacgcagtaagtcagacaacacttgccacagtgatgtctgtcaaaatggctagccatgaaaactccagcaccacactcatcagatggacactctcgacgaaggcaactaattttgccattttcatcctccttatagcacttcagcacagccaacttaaccttctttctcttatgcttattcttttgggagtggtgtaagacttcttcttcctgttcttagcaccaccacgaagtcgcaacacaaggtgaagagtggactcctttaggatgttgtagtcagacaaagtacggtcatcttccagttacgtcccggcaaatatcagcctctgttggtcaggaggaattccttccttatcctggatcttggcctttacattttctatggtgtccgagggttcatcctcgagtgtaatggttttccccataagggtcttcatgaaaatctgcatcttggtggtggttccaccacagatggtggattggaaaggaaaagctgccccaagaagagttcttgacccatggagccatctccctagtcccaggaatgtaaaatttgaagcttgcaagcaacctagttttccactaaagttgtaaagtctccctttcacttttgttttgggtggtgctggttgaagatggcaaatagactagatttatttatctttttcctctcaagaacccactttaatgagtatctgatgtaggtcagataaaaatctaccaagagaatacaagagaaaattcacataccagggatttcaacacattgctttgcaatggagagactgtagaatccagtgctacaaacctatcaaagaatgacatgaaggaaattctggaaacatggtatccattgggcaagttcagtaggggctgtgggaggttctgccacacacttgtcacctgaagcagcagcgtgcagagttttttctcatgacagactggaaccctttactaatgtctgacaggcatgggataggaaccagaaacttccctggcttagcagctagatgttaaagtggagtggtcaccctgagtcccatgtgaggtcaacctacaacgttctatgagatcaccttccgacctgccttcttcctcttcccttcccagtttccctggctgcacaggctccttagcaaagtagcccagaggcacacgaatacagtctgaccagtaccccatcctcagcagctactatagatcttctgggaagctttaatgtcacagctctgagaatggacaaccggtgacagccagaagccttcagcatagaagagagccatcaaagtcaacaatgagatctaaataagcccactgtcattttgcaagtgggaaggggtaaggaagggaagtcttgctcggtgagtacaatgcacaaataacacagtaaatgaagcccaaatcactcctcttcataagcagattctccatttctacaaggggagcctctttccacatgagatgctggcgacagatgggtaattaggtatccaccaccacccagtcatttctaagcctgccctcccctaggacccgcccctccgtattcattcactaagagtaattttgcagacagtctctgcacagctggtaggcactatgttgtgtctcacgtggaacagcttagacataataggagcagaatcctgagcctttcgtcctctgctcttccccaagatctcacatcacttacatggaacacacatttttaacactcgcttaacattctgtctgtaagacgagacatcatctgccatagcaatcacaatgcatgccaagaaaaagcacacttcacaatttattttacacataccatgcatttttccaagttatagcaaattagtgttttggcaggctaagataaagtacctacttgaaaactgacttcattgttcttttccttaacaaattttaatgaggaatttatactgttaatgattttgaactcatctagtatagtcctttcttccaaccccttaaatacatgcatgtaacacacacacacacacacacacacacacacacatgcttgtacacacaaagtgccttattatggagttatatacagatgctctctaagttacaatagctagatttatgatttctctcttcgtgatgatacaaatttatatccattttgtagaaatcacatttttcaaattgtgaatatggatcttttctggggctgacttactctcaggacgctgaagctcccaatcagacaagattacaagggcaagcagctgatgctctacaatgaggtatgttactaagccagggtgttcagtaggttaggggtattgagtacatttctgcttatttctatttatggtaggtttatcaggacctaacttcaccataagttgggagaatctatttctaacacaagatactgaaaacaaatgcaactacaactttatcatccagtgtttgcacgccccattttgagaagatgagttaaaattcatatacttcctaataatccaatttccaagcttgaagttgagattattcttaagtgagacaggagaaatggtcaagcctcttctctccagagagaaaatgtgtgtggttcctcaatacacacaaaagatagctacattgttaggttctcttgatgcgtatgagtgcagaattctggtcctgtgtccaattttgaggaaatcacagtcaaaagcagaacagctaaccagcgaagcccagaagtgctgcaggggctgcccaagtgacagaaagcccaggggtgaaagcaaggcattagccactacagtcactctctagcaagcccctttcctgttgaaatactggctttgtttttttctgtctgtttgttttcccttctttcttccctgacattcttttccttttatggtagatctcagagggggtaaaactttaaggcaggaatctcagagcccctaaatttaatcacaaaatgttaactctgtcattcccaaagatatgttagaaacaaggaagaatttatttcatagagagatagacaggacatagagacaaacaaggttcttttcctgctgtttatgtatgaatacttactgtaccagaattgtgtgtgcgcaggtgcactgtgtgtacagaggggcaggaccatacctagtggatgctaaagtgaagcaaaggtctatgaaaacccagaccgtgggtcagcaaatagtctatgagacaaacctactcaattgcctggcactgtactgcttaagaactgaaagaggtctattttttagatagctgaaaaaaaaaatgaagaacagttaattttttctgacacgtgaaaatcccatgaaattccagcacccttgaatacacttattagaacacaactatgttctctggccttcacagagtcaagggctggttctgtgctacagtagcagagctgagaaaatgtgacagagactatttggcacatggaacctatttactccctggttcttgacagaaaagtgtggaggtagccatgctgaggactaggagtcatttttgcttagcatctttgtgagagaagaggtgtgtctgccttaccttagccttttgggtctcccttagctttcccagtggcagtataggaagcagtgggaaggccatgtttcattactgctctttggaagctgggaaaggtaagatgtagacctgttcattgctggtaatttatgccggcactgtattctggcttgagtcttatccagtccatggtatccagaccagaaaggtgtccatgtaatacacactcacacaaacacactctcacacacttatacacattcacacacattaccatactcacacactttctcacctacacactcatacacactctttcacacatactcacaagactctcacacacttaccaactcatacatattaacatactctcttacacacttacatacttatacacacactcacacacaatcacatattatcacactcatatactcacatacacatatacacattctctctctctctctctctctctctctctctctcacacacacacacacacacacacacacacacacacaaacatgcacacacacagatgagggatcataactgagagtcagcttgagcagaaaaggtgagaagctgatgtgagcacagaaaggcagaagagacttggagaccaggagcaatgtagcctcattcctacgcatggacctcaggaaagttccttttgccttgtcctttggtttctgaggaaaccactgtgggcctcaaaatttcatctcagctataatttttctgttgatgcagttttgaagttgttaaatcattaggagacaaacaagagttaggtatgtggatggtgtgtaataccataatacctggcattccttcgtgttaatttgtggtcatggcattgagaacacactgagattgtagagaaggttttgatgtgtatgtctattacacaactagacagccataaattatgcaatcatacttaagtgcagccttgagcagggaatgcagctcactggcgggatgcttgcttcgctcacatgaagctccgggttcaatcctcagcaacacacagagattaagttaggcctttgttcagcctgtcgctatggaaaccatctatggactgacttctagctcctgcagtacaaaacatccccaggtgtcagcttcggcaaaaaaggttcttgtatttgcaggtcatttggaagaaaagtggatataaaaactatttccacaactagaaaaaatacagcaaactaaaattagaatcaagtatctggactgaacaacgggcactgcagagaagcaagcctcgggaggggctcacaaggaaagggtcaggaaagagccatgaggagagcccacactctcggggtcacactctcaggaagccaccagatttagctaggaaccagccaatctcctcattctattttgtatatttttaaatactttgcacgatttcttctttgggaaataaaggttatactcaaagtttacctttctgagtgttgtgacatctatatccacactaccaaatacccaaatatgttgatgatttgacataaatgaaaaaaacccttcaaacatgggattatttcatgttataggaaaataagtactcttctggctggtttcatataatgggcagtgtgttttgcactgtgtgtcaggactcatcagtgctgaaatcagtttagtgtgttggcaaacaagagcagaacagggcacaaaacaatgtgcatcacacataacagaagacagacattgttgcataagtgtgttttagtggtgtatatgtgtgtgttcacacacaatcatttgtaagaatccattacaaccaaatgggagccactgcagtcaagtctagtgtaatattcctaacccatcaaatagaaaagttggaaggtaattattcttgttaaatggaatgtctttaagtgacacactttcccactgcattaaaatatgctaaaactttgattggcccggtgtgcctgcaatcctaactactaaatgaggcaggaggatggctagttcaaaggcagctgggcaacattctgtctccaaaatagtgctagtctttgtggggaaagagggatacttaggtgtatctcttgtcaaatatccttctttaaataacatgtaactattaatatatacacacttgctcatgagataaagactcatcaaaagtcaggctcatagatcacgatgttatttagaaggatgaataactggctcctttatgaagcaaagcagtactatttgtcacactgattctacactaatgagtgcaccatggaatagaagaggaaacttctggagaaacctggcaggcaaagttagctttgccacaatcctaccttgacaacttctcatggtcacttcacagacaccaaaataaaatgaaactgccattaaaagagaaatacatttaaggaaagaaaaaaaatccactctgtttgagtgcctaccatattcccccttttgtagtacattctcttaattactttctacttattgtcagaaacccaaaagcctattacctgggagacaactggcattgaaaagcaagcaagtcattaacacagaggtgatggcagctgaatataaagggagagaccgtgtcaacaacagataagctgtaagactgcaggctgcatgaaaagcaacagtgttccaggggctggctgacagctaatgggagaagacagcctgaaacaaccccagtcagtacaaaacagggctgcttactggaggccatgcaattgaaataccataaaccactgtatccaagaggaaaggacaacaagatttaatggggatttaagtagatattcctgggaggggctgtataattccctcggttggatatctgtatccagccatggggaaacatgggttgggacatcacgatactcctggaggaagaagaaaagagatgctcttgtgttctggagctgagcaccgagttcacagcggctgatcttacagaaactcaagcagtgccattatatcccaagaaggaaggaaatggatagacacaaagtggtctcctgatgacaagctcagactttgccctagtttgttttctgctgctgtggataaaacagtgaccaaacctacttgtggaaggaaaggctttatgtagcttacacatccatgctacagtctgttatcaaaggaagtcagtgcaggaccctggagacaggaactgaggcagagaactggcttgctctccatgacttgctcaacctgatttcttatacaagccaggcacctacccaagaaagaaacttcccacaataggctggaccctccctaatcagtcactaatggacaaaatgccacatagatatgcccacaggccaatcagatggttccttcttcccagatgacactagtttgtgtcaagttgacaaaactaacgagtacagaagttaaaggtttatgataataaatgacttcatattgtttgagagtagatattccatttccaagttttagttttacatatacagatatatatatacatatatatatatatatatatatatatatatatgtaaattaacactttaggcacaagcagacatttgtatctattactagaatgtacatattcaaatggccaaaaaacctttgtgaaagcctcctattttggaaaacttggggccacataaaaatcaagagtattttactcgtgagaatcgagaatattgtgcatctctggaactgagacttgtcaatgactggcttatgagtgaatggaatatgggcagctgttacagtaattcaaaatctctatattaaaataccaataattgctgccaaactaattcttaatctgtcaaacaaaattacttctggtgtctctgtgccatatggagcagaggcttggggccttctcgggccacttctgagtttgtctatactttgactgactgtgccccatccactgctttgcattccagccagttcattctatctgtttctctgccttgaggctttcctcagtgcttctcaacagtgctcaggcttacaccagaagcttgaaagtgctggctgcttactgtccctctgcagggcaaatggtgagggcatttcgctggtcctccatcctctgctgtgcaattctatgttgtgctcaaagcagcgacctgttcatcattaattcacctcttactggctttcttcttcttcttcttcttcttcttcttcttcttcttcttcttcttcttcttcttcttcttctttttcttcttcctctctctctctctctctctctctctctctctctctctctctctctctctctctctctctctcatgttctttactctcaatttgtacttctggggcttgtcttccaatgtgaaactatctggactcaagtccttgttccagggtctaaatacataaatgacctcagtgtcatatggtgatttgctgtcctgctttggaaagcagctagttgttggcagaaagcaaactaaagggtcatgccctcattccttctacctgggctgtgaaaaccattggaatcattattaatcaaggacagtaagtttcttaatgatctcctattgatgtaagggctgtcctgtgtgttgtggggtctagcctagaggacctcacacttgcaaatgggacttgaaatgtgggagaaacaatgagaataccacatttaaagagaattcagaccccagaatgttccaagcagagggcctgcttctggcagactagcagctcatcgatacccataatccctcttcatgttttctagttttaacatgcctgtctgagaacacttacagtttcagaaacccagtattaactctcaggtcagtacagtttgggacatggtgagtgagccttgtgagtgacagattgaatactgaaaggcaaaggatatgcttctctaagtggctgctccttcaatcacgtgggacaccatatgtcccaggtaaacacagaacccaaatatgcatctctgctgacccttgatcttgcaaagcatgttcccaccttcatcccttctctcaaacattatatagttcactccctctccgttttaagctttgtctgtttataatcttttcctgctatcctgtataatatcacctcctacactggcccgctgtattgccttccctgtgttactctcttttcccctttctccttcttttcatgtgtctgtgtatttgatatgtatgcaagcttggatgtgcacgcaggaggccttagattggtgctggaaatgtcctcaactgcttttctaccttgttattttaaggcaaggtctcttaaccaaacccagaggttgctgatatggctcctctctctgcatgatctggggaatcctgtctgtcttctgaagctggaattacagttaggccaccacacccacctgacactcatgtgggttctgggaatccaagccttggtcctcatgcttgcacagtaagcaccttaaccactgagctgcctccctggtccctcccctaccattttgttcttattcataaataacatatagtgtcacctatttatttcacgtggtctcctcccactaaaagctctgtagtgaaagggactcttccaactcccatactcaacctctatcctttcagctagcctgagagggcgtttgattaatagttgttaaaagtacaagcaaattctattagctacagataaagttatacaatctcatctggaatcgtctcgctcatttgagaaagcaagcatccgtatttggtgagaaacggtgtccttgcttttccagataggtgtacgtagcagctatgaatacataaacaggtttatattaccataaccttatacgggtcacagaattcaaatcattagatatccactgtctaaataaattctgaaatttcagatctcagagactatatttaactcactaaaacaaattaatttattcatgaattcatgtgacaaaaatctatcgaatacttatgacgggtgtggtgttagctaaggtgctatacttgagttttgaaaaatcaactttacacttcactgtaaaagccatatcttgctgtaatagataagaacaatttatctttaaaaagaaagccttatttttctccattatctcattataagctttatttatttaactcaaagatcctcaagaggaagttctcatggcaaagctttctaacagagtttcagataaattcaggcaatgttaaaagtaaacatatttttccatggagaataagggacagaaaccccactgaatttagcaatactgaatgttcactattacaaaaattaagtagttgctaaagtctaattgtgtgcggctcgtggcttcctctacaaacccaaacacagagagacaccttcctctcgggaagccatggtcattcactcatgccaattttccacaacccacgagctgttgccattctactcctggtcccaacctgccctcccttttctttcatcttagtcccctgtttccatctcaggagctgttcttccacctggcgtgggtcaccattttgaagtctttatcaatgtaacctcctgctaacaccgcagatcaaatctctgaattgatttatagcccaggcttatgaagtaggtttccttccctctgctgtgccattcctgtgatgtatcaccctctccttcactacccaacttattaaaggacaagtctgtttgcaccacttgccactctcttgatttcttcttccatgtagcataaacgcccaatttccccgtggtatcatggtttattccttttgaccccacagatcaattttcaaatgtcttttacttccaagtcttctgaaaaataaaagccaaacttttaaaaagaagctcataatagaagagaaaagcattaaagctactttaaggtaagaaagggcatccacgcaaaacaaatggctggctggctgcagcctgcagggaaaggtgcagccatttaccaacctgaattacagattcaagttgaacctttaacctcgccaggccaaacgttagaaaagcagggcatggcatttgaaaaatcatctcatttacatgagaaaggaaatcagaaattctcaagccatcctttgtgctgccctgcaattctttctctaaccaggttagtatttactttggtaagttctaatatttttgagctctaatattttgagttctatttactagaactcttcaaatacatactgattagtaagaatgatgttcaaagtgaactttaaactcagttagaaatgattcctgttttcaactttaaaacaatgaaacaataaatactataagaaatttacatatatggttttacttgcaaatacagagatggtaactttttttttactataaagaaaccaaaacctcttaactgacttttacatccatcagaaagagatatatgactgaagcaataagagaataaagaactaagattcaaaattcatttttataaatactcttttaaatcttgggtgagatccaacaacctcacattaaaattttagaagtcttgacttaaaggacatggggcaatttattttatattgacagcttccagggcacctggcccatatatcatcatcaattttttaaaaacgacaaatgagaagaaaaaatcatatgtggatggccttagttttattattttcaatggatcaataaaataatgcaatctttgcccaaagaacaaaatttttaaaaatttaagaaaaagaagtaaatctttggtctcaatgtgttgtacatttatttgtacagacttgattattacaggcttttcaaagaggctcagggcagcccatttgggttctgacagaaattcaatagaatttgaggtattatgactaaaatgtgtcccaagcaggttaatccactcatacgatttcaataaagtactgagctattagcataaaggtgcatttgctcctatggatactgcaggagaaatacagactccagggaaccaggctgcagtggacacacatgaatatgccatcatgattcctctctctccccaaccctatctttattacgcagaggaatttaagcatctatagactctgggtgctttttggtgtcctggttcctagacattaccggagagccggacatttgccaaatttcctccgagtgctgcactgacccgagatcttatcaccatgggtcgcaagagatttcagttcctaaatggaccttctaaccattgtgaaagctgggcgagtggatagcagaaattaagtatcccaaggaaaaaaccgtttcccaaggaaaaacacccaagagaacgtaaaacatttctcagtatgggctttttcctcgtttttatctccctctcaatctctttcttttatttttaaagccccacccccttaaacacctccagagtttattctaaaagaagcaacacaaagactaccatccttcagccaaaagggtttcagtatgcaaatgtggaagacttggcgataaaagttgtaggaaggggtccattaaacacccttctctttgggttagacaagagataaacaatagaaattgcagagtcaggcagtcagggatccgacggaggaggggctggaaagtatcaggaaagctcccttcagaaccagggacaccggcagtctcaaaaggtataaccattatcctgttttcctgccatgtgcctcaaagcaaaacgctcacttccacatgcccgtattatgaggtcagggaaaagggaagcgagaatccctacacccagccacccaagaccagaaacagaacagaaactgtatgtacttgacttgcatggtcgaaataaccaacactgtcccacagtgttagctggtggcatcaagtaaggaaaagcagatcgctggatgtggggcgcagtttggggagcgtggatccaattgcacgctactcactcttacacaggatttttacaaacccggccttaccctactgcttccctccacacttcacacaccaagtgcatcctgcccacctcacggtttccatcgtcagtcagccagagaggagggatcctagcggggattcctggaaatgtcatcccccctacacctcggatccgccacctccatccccactgccatcacacagacgcagacacacacacacacacacacacacacacacacacacacacacacacgcacgcactgccatgactgtcatcaggcccgctcttctcaaagcctggtatctcagcgcgcaccggacgcctggcatctctctggtacacacccttcccccgcctcgctggctccaggctttgccccctggatgttgcccgcagtccctgttcatcctcactattgttccacgcagcactcctcgctcccaggatcgcccttccgagagcaaccaggctccgtccggggcgtcgggcgccccgcactcacccagccctccctggccatggtaccttgcctgacagctgggtccgcgggcccgcgggagcaggcggcgctagtgacagcgaccgtgccaagcctgggaataaagctgctctctagccgctcccgcctccagcgccaccatcttcccccgccgccaccgggaccgcagccgcccgcgcccggctccggctctagctcggcagcggctcgggccccccgcggccccaccccctgctcgccgcccgctcgcctcgtgacgcgcgccggggccggccggctgcgactgacggcggggggagcgcgcgcacgccgcgtgcaagcggcgcccctgcctcccacgcccacccgcgtgctcgcgcggcgcgggcccgacgcggcggcgcaggagtcccgctccggcgcgcgtgagcgtgccaagtgtccgcgcccctcgccgtggccgcgcctgcaatcagagcgcgagtccctccctttcgtgcccgggatcctggggtggactacgtggctgcctcccgcggggacccacggggacttccatcgtccccaaccccaggtccctaacgctcatcccgggcccgacctttgcatatgggatctggccacgcttaggacacggagcggagcagccgcgtggacggctgcgcgtgtcctcttgttagtgacaccgggctttcccgcttccagggtctgaaagtcggaaaaggctggcaacgcgcctccgctctccgcatgtggccgccagggggcgcccgcgtgggctcgagcggagcaagctgtccgcctggttgcccaccgggggcgctgctcagtcccactccaccctggaaacgtctggaaggcggggccagggaagggtccacttggcttctccgtatcggttgctaggagcttcaaagagtcttccagcccggcacgggtgatctgctcgaaataggactgggatctctggagggtggggaccctttccattagggaccaggtggcaggtgctgtgtcttaatgaaaagttggactgccccccccggggggtggggtggggtgggggtgggttctggcgctagccccacgtgttccccttcttccagacagagttctcaatttaaaaattaaatcatatttccccgaaaccttttagttttccagtctctcttcgtacacttattctcgtctagcgaaatgaaaacaaaaagccttgcttatccgacctcaggagagatgagcctattcgttgcatggtgtttccatattgagcacagtacctccagaaatatctgcgggtgtagcctgaagcattgtagaatttctgtttagctttaaaattcgtatgaattttgcactctatttcataatgaatttctttgctttgacagagatgactatagcttctcctgtcccctaaatataataaaacatacaagaaatatgtaccattgttgcttgtcctgtaacattcattacctattcattttgtcagtatagatactctcacgggtgagagacagatggtgtcctccagaactcatagcatcctggggaaaatgttacacaatccagagcaactgtgagctttccaactgcgaaggtgctggggatgggggtggggtctgatgttgactgggctgcctgaggaaagggctattccaggagaccacttagaaggaagtaaaggtgtgaggacccctctcgtgggtctgaggcacagcacgcctcaagcaggcagtagtcacagcttttactttttgaggcaaaaaggggcactaggggttgttgagagttggattgatccaacaagaacaagcagcatcacgtttgtttctgttcttgaaaggtatgtgaggcagctcggtggagagagagcgcggctcagaggcgcagagtctagggcaggaaaaccgagtcaggacgaatcccgaatctcttgctatgcctgtttggtgaacgctttctgggttaggtgtgtcttctagctggcagctctgttaagtttttgcctttgctttcatttgcaccccttggggaggggggcaatttcagagtacatttctgtcattgcttctgttcccttattgtaggtttaccatgcaagcttaacttactggttaagttttggttaaataggagagagtacagatccttggtgagaagcatattttgatgctgtggtagttaaatcttcgttatcctgacagctcgagaatcgctttagatatcccctctgacgaaatttctaggttgatttgactgaaaagagggaaaacccaccctaaatgtgggcagcacctttacacagactgactctagactgggtggctataaaggagaaactgagtagagcctagcactgtgctcctcactctgccacttacaatggactcagtgtggccagacaccacagtatgcaggcccccaagcctgctccaccccgatggaggcttccttcctttagttgctgttgtctggcattttgtcacagccgtttcaagaaaagcaactaatacagctgtatcaacttgctaccatttggtttgccagctcatttcccccgtgtgttgtgtgatattcccaccaaactctgagtagcagaaacatttgttgctttcctgattctttccaatcattcttagatcacaggggtttggttaaagcaaatgtgtaaaggcgctttgctagcatcactataatggcagctatttgtcaatgtttatatatggaaatcttcctttcacaggaacatagatgtccttggtccttctggatggtgtatttgtgcctcatctagcaggaagctccaaaccacatttgtagttcagtgtaggaaatggaggggcccatatggcatttatattcacccttccttcggtgttagtctacctgtagattctctgtatctgcattactggtatgtttctaccttattattgatactcttctaaggacttcaaatatttatgtccaccttctgttaacaaaagccaaaactgctattccctgcttcaaagggcagtatataaaatgctggcaaacggccagccattgtagcaggtaacagtctgtagacaggctgccaagtgactagagtctaagttaaagccttacctgctgcggcttgtgggtcacaagtctgtgcataccagtttaaagcctcatattaagaagcctcatattatctgtgactcctagataatgagtctctctaggaccattcctgaggtccccttctcccccagccccaagcccactcttcttaccctctgagtattgtttacaactcaagagggaaggtaggggttcatgaacatttcatttatgtttgttgacagtagacaccttgaggttatgagatccaataacttcattggaaccccacaggcatgtgagcagatcttcttggggtttaatgtggctctacacagaccaagctgcacacctcttctgacagcaggggctattgccacttgattttgatgttttcaggtgactagtgtcttcctgtcgtagtctttgagtttggatcttaaaagctgaaacagcatataggacaatcacaaataacctctgctaatgcacttttccctgattttagttctgctagtgtttgatagtccagaaaactatctaattgctgtacaatatagctatttttgttaaagcatctaaaatgcacaagtaaaataaaatgatggactatatgtatcctaaacatctacaggcttgtccttgtatgtcatttcttcttttatcagcctttcctctgggtggaagtcctgccctggctacacaacatcacttcttctctaattcccaaacagctcagactcagtcaatcccactcacgtgctccctatgattccagtcataattttgtactgtaaccgtgtttggctgacatactgggagatgctatgtggagtaaacccacctccaaagtgatgtttctgagggaagaaagttactagaagatgtcgagttttattttatttttataatttatttttttaagtttcattttacattccaacctcagtacttcctcctacctctccttccacccactcttgtttccccccctcccaagttcaccccctgtccactcctcctcatgggtaaaggctctcatgaggagtcatcaaagtctggcacattaagttgaagcagatctaagccactctgtgctgcattaaggctgagcatggcatcccatcatagggaatgggctccaacaagctagctcatgcacctgggttaaatactggtcttactgtgaggggcctctcaaattgtccaagcataactacagtctctcacacacagagggcctagtttggtttcatggaatctctgcagctgtcggtatagagtgtatgagtttccacaaacttggttcagctgtatctgtagatttctccatcatgattgacctcccttgctcatgtattccttcttccctttctttgactggattcccggagctcagcttggttgtgattctctgcatctggttccatcaattactggacgaaggctctatgatgatagggtattcaccaatctgattataggggaaggccagtttgggcatcctcttctctattgataggagtcttaagtggggtcatccttgtggattcttggcaattaccctagtaccaggtttctccctaaccccaagtggctctctctgttaaggtgtctctttcattgttctactgtatcccccttgaccatcctgttccctcatgttctcatcccccttccccttttccaccccctcccagtttacccaggagatctcatctgatttcccttcctagggtgatctatgtgtccctcttagggtcctccttgttacctagcttctctggaactgtggcttgtagtctggttatccttggatttacatctaatatctacttatgagagaatacatactggtagtgtttgtctttttgagtctgggttacctcactcaagatgttttttctagttctatccatttgcctttaaatttcaggatgtcattgtttcttacagctgagtaatactccattatgtaaatgtaccacattttctttatccatttttttcagttgtagattgtttccaggttctggctattatgaatatagccgttatgaacattgttgagcaagtgtccttggggtatgattgagcattctttgggtatatacccaagagtggaatcactcaatgggtcttgaggtagatggatttctaattttctaagaaactgccatactgatttccaaaatggtaattcccgatagcgatggaggagtgttccccttactccacatcctctccaacataagctgtcctcagtatttctgatcttagccattctgacaggtgtaagatggtatctcagagtcttttgatttgcatttctctgatgattaagaatgtttaacaattccttaaatgtcttttggccatttgagattcttctggtaagaattctctggttatctctgtactccatttttcaactggattactttgcatttttatgtctagtttcttgagtccttcatatattttggagatcagccctcagtcatagttatacataaatgaccccaaaaactctacccgggaactcctacaactgataaacaccttcagcaatgtggttggatacaagattaactaaaaataaataaatttaaaaaatcagtagcccgcctatatacaaatgataaacagaccgagaaagaaatcagataaacatcaccccttacaatagccataatatataaaatatcttggggtaaccctaatcaaacaagtgaatgacctgtgtggaaagaactttaagtccctaaagaaagaaattgaagaagacatcagaaaatggaaagatctctctgctttcctggctggagtggcctgtatgtttgaagggaatgccccctggagttgggggctgggataaagcagtgagtgggggtatggggtaaagaggaagatctataggatccactggagctggagacaaggagataagagagggtgcagcacgtgggatgctacagagctgggagtgagacttggggattgaatttggaggactggaagcagaggtgaacatcttcagttagcctacctgcttccctgtctgcagtgcagtatgtaaaatattttaagacactatgtatacaaccttaactcggaaaaaagagcagattatttgaaaattctgatgtaaaattaatgtcataaaattactgctgggacatctcatattctaaagcattttcccaatttaataagcctctaagatttattttaaatgccacatacttcaagaaatcattttcatgtagccagtctgacagcaatgagaatagtctacagagacacttgtatccttccctttggctcttagactggtgaagtagccctcaaaaaattaggatctcctcctcccagcatgtgctggcagaaggcaaaggctgaggcctggtgccagccaacaggggagacttgtctccagtaaagagatttcacacagtgctaacaactcctcagagcagcatgcaggggagaccggagccatgacgtgacctggactgggcaggtactctatttaaacccaaaactcaggtcaggatttggagtgggagtgtatgccaacatgcccctttgtcagtcttcccaatgtgatgacatggaataaatccctgcccgcaccctcatcccagctgccacagattttcgaatatagaaaaccaatcagaatcatgttatcctcgccagtgcactatattatctgaatatttgttttcaaccctagtcacctcacagggccctgggatgtaagtcaacaaaaagttaacagattggttgctcattctgcttcacacttgcttaaactcttggttgtttccaaatttatttcagtcataaagtacctggatattatgcccatctcgttggagtaccataaaatattgatatatttaatacctcttacaaaccagggacaactttactagaagaaaatatggctttgtgcttgctataaaatataacagtacagtcaggggcacatttcctccaaaataaggagctatgaaattaagtgcttagcaatttcatacttttgtcagtacatgtttgcttcagatgggcatctttttgtcatcttatgaaagacactgacgggatcagggaagaaggctcaggtggtaaagtgtttggtgcacgagtgtaaggcctgagttcccatccatagcatcctcgtgaaaggtaaaattgtataacagcagatgtctgtgatctcagtgttgagaaagagacaggcagatcccttgagctcattgacctgctagtctagccaaataaatgacctcagaattcactgagacacttggttgaaaaaaaaaaaaaaacaggctaggaacaataaaagactctgaatactggcctctggtctttacctgcatgtataccctgaaccatgcaaacctgcacagatccagatgaacatatgtacaccacacatatgcatgagtaaagaagaaaacaaatatttctaaacaccagtaacaccagtaacataaggcatatgtatgggataaaaatgaaaaaacccatagaattttaatagccatttttcctcttttaatagtttatagagaaacaaagaaaaataggctaccgttgatcatatttgacagaatatttgtgtgtgtggcggggagggggcagattttgtcccaagtgcagtggtgttacctctcaatatagtttctgagccccgatagtagtagctcagtgtcagttaaatcccttactggttcctcttccaaacagtatcaaatattatggctggtggatttattatctttctaattattccattccgacatttcaaagcgatcaaaataattttgttttaaaaataatttcctgtttattttttattaagtccaatggcttctattgacttaaaagtaagactcagaaaaagttttaatggtaaatagtatatgggcaactttgacagaccttcatctcctccgcaagccatgatctctctctctccctccctctctctcttctttctccccctgtgagtctgtccctgtttctctgcccatctctcttggcatctcctgcatctctttctcattgtgatggttactattggttgtcatcattattgaatccagaatcaccatggattgtttgcatccttcacctgcaaacaagcttgtgaaggatgacctagagtctcagcctctgggcatgcctataaggaattctcctgattagcttgatgggagtgagaaaattgctgtctgtgtgagtggcaccattcttgggcaggatctggaactgtagatcttgagaaacagtgctggctgagctctggtgcctttcactctctgcctcttggctgtgggtccagtgtgaccagctgtctcctgctacctgacctctccatcatgacagactgcaactgtgagtggaaataaaccctccctgcagttgattttgttgggcattttaccacagcaacaggaaaagtaagacatttgcacattcatttttattggggtttgcccttatgcttgcacagtgtcatcaggatgaacaatggcaatgtaccag
